(19) United States
(12) Patent Application Publication
(10) Pub. No.: US 2025/0135002 A1
(43) Pub. Date: May 1, 2025

(54) COMPOSITIONS FOR AND METHOD OF EFFECTING TUMOR CELL DEATH

(71) Applicant: Duke University, Durham, NC (US)

(72) Inventors: Chuan-Yuan Li, Durham, NC (US); Fang Li, Durham, NC (US)

(21) Appl. No.: 18/835,496

(22) PCT Filed: Feb. 3, 2023
(86) PCT No.: PCT/US2023/061927

§ 371 Date: Aug. 2, 2024

Related U.S. Application Data
(60) Provisional application No. 63/306,634, filed on Feb. 4, 2022.

(51) Int. Cl. A61K 40/41; A61K 38/00; A61K 40/11; A61K 40/31; A61K 45/06; A61P 35/00; C07K 14/47; C07K 14/705; C07K 14/71; C07K 14/725; C07K 16/18; C12N 5/0783

(52) U.S. Cl. CPC A61K 40/4285; A61K 40/11; A61K 40/31; A61K 45/06; A61P 35/00; C07K 14/47; C07K 14/7051; C07K 14/70517; C07K 14/70521; C07K 14/71; C07K 16/18; C12N 5/0636; A61K 38/00; C07K 2319/02; C07K 2319/03; C07K 2319/40

(57) ABSTRACT

Disclosed herein are compositions comprising a chimeric antigen receptor targeting phosphatidylserine on the surface of cancer cells and methods of using the compositions to treat a cancer in a subject.

### CROSS-REFERENCE TO RELATED APPLICATIONS

[0001] This application claims priority to U.S. Provisional Application No. 63/306,634 filed 4 Feb. 2022, which is incorporated herein in its entirety.

### STATEMENT REGARDING FEDERALLY SPONSORED RESEARCH OR DEVELOPMENT

[0002] This invention was made with government support under CA216876 awarded by the National Institutes of Health. The government has certain rights in the invention.

### REFERENCE TO THE SEQUENCE LISTING

[0003] The Sequence Listing submitted 3 Feb. 2023 as an XML file named “23-2064-WO_Sequence-Listing”, created on 3 Feb. 2023 and having a size of 1 MB is hereby incorporated by reference pursuant to 37 C.F.R. § 1.52 (e) (5).

### BACKGROUND

[0004] In cancer treatment, it is highly desirable to exploit cancer-specific markers for therapeutic development. Many such markers are cell surface markers, which provide excellent targets to develop cell-based therapy such as CAR-T, CAR-NK, and CAR-Macrophage.

[0005] Phosphatidylserine (PS) is an abundant lipid molecule and an integral part of the cellular membrane. Unlike other abundant lipid molecules that evenly distribute in both the outer and inner cellular membranes, phosphatidylserine normally only resides in the inner cellular membrane. PS often “flips” from the inner to the outer cellular membrane in dying cells, especially in apoptotic cells. As a result, cell surface levels of PS have become the most widely used molecular marker to quantify cellular apoptosis in research. Most of the current paradigms for cancer therapy assume that PS-expressing tumor cells, either from exposure to internal or external stressors, are destined to die from apoptosis. However, PS-expressing tumor cells may survive the activation of the apoptosis cascade. Thus, there remains an unmet medical need for ensuring the complete cell death of PS-expression tumor cells.

### BRIEF DESCRIPTION OF THE FIGURES

[0006] FIG. 1A-FIG. 1C show the survival of phosphatidylserine-expressing AML cells. FIG. 1A shows FACS sorting of untreated c1498 cells (in DMEM with 8% FBS). The rectangles indicate the sorted cells. FIG. 1B shows FACS sorting of c1498 cells treated with cytarabine (1 μM) for 24 hrs). FIG. 1C shows the estimated live cell numbers in the sorted cells. About 1000 each of the sorted cells were placed into multi-well plates. When the cells reached sufficient numbers, they were counted at different time points to measure their growth rates. The growth rates were then used to estimate the initial live cell numbers. The following formula was used to calculate the minimal initial live cell numbers: Minimal initial cell number=Total cell population/(growth rate*t) (days to reach the current cell number).

[0007] FIG. 2A-FIG. 2D show the activities of PS-targeted CAR-T cells against various AML leukemia cells. Annexin V-CAR transduced T cells were mixed with AML leukemia cells (MVR-11, HL60, KG-la, and U937) labeled with the luciferase at different target (leukemia cells):effector (CAR-transduced T cells) ratios and media with 10% FBS for about 24 hours. The survival of the tumor cells was then measured by use of a plate reader. The values shown were normalized against tumor cells not incubated with the T cells. Y axis represents the relative luminescence values while the x-axis represents tumor cell vs CAR-T cell ratios.

[0008] FIG. 3 shows the anti-tumor efficacy of annexin V-CAR T cells against KG-la AML leukemia cells in vivo. About 5×10⁶ KG-la cells were injected subcutaneously into NSG mice on day 0. At 6 days post-inoculation, about 1×10⁷ control or Annexin V-CAR transduced T cells were injected into the tail vein of tumor-bearing mice (n=5 for each group). Tumor sizes were then measured until they reach 1.5 cm in diameter.

[0009] FIG. 4 shows possible structures of PS-targeting CARs as disclosed herein.

### BRIEF SUMMARY

[0010] Disclosed herein is a chimeric antigen receptor (CAR), comprising from N-terminus to C-terminus a signal peptide; an antigen binding domain; a hinge domain; a transmembrane domain; and an intracellular domain comprising one or more immunoreceptor tyrosine-based activation domains (ITAMs) and/or one or more co-stimulatory domains. Disclosed herein s a chimeric antigen receptor (CAR), comprising from N-terminus to C-terminus a signal peptide; an antigen binding domain; a hinge domain; a transmembrane domain; an intracellular domain, a cleavage signal; a signal peptide; and a tumor-specific antigen or fragment thereof.

[0011] Disclosed herein is an isolated nucleic acid molecule comprising a nucleic acid sequence encoding any disclosed CAR. Disclosed herein is an isolated nucleic acid molecule comprising a nucleic acid sequence encoding a CAR specific for phosphatidylserine (PS). Disclosed herein is an isolated nucleic acid molecule comprising a nucleic acid sequence encoding a CAR comprising an extracellular domain comprising an antigen binding domain, a transmembrane domain, and an intracellular domain comprising one or more immunostimulatory domains.

[0012] Disclosed herein a vector comprising an isolated nucleic acid molecule comprising a nucleic acid sequence encoding a CAR comprising an extracellular domain comprising an antigen binding domain, a transmembrane domain, and an intracellular domain comprising one or more immunostimulatory domains. Disclosed herein a vector comprising an isolated nucleic acid and an intracellular domain comprising one or more immunoreceptor tyrosine-based activation domains (ITAMs) and/or one or more co-stimulatory domains.

[0013] Disclosed herein are cells transformed or transfected by an isolated nucleic acid molecule comprising a nucleic acid sequence encoding a CAR specific for phosphatidylserine (PS).

[0014] Disclosed herein are cells transduced by a vector comprising an isolated nucleic acid molecule comprising a nucleic acid sequence encoding a CAR comprising an extracellular domain comprising an antigen binding domain, a transmembrane domain, and an intracellular domain comprising one or more immunostimulatory domains. Disclosed herein are cells transduced by a vector comprising an isolated nucleic acid molecule comprising a nucleic acid sequence encoding a CAR comprising from N-terminus to C-terminus a signal peptide; an antigen binding domain; a hinge domain; a transmembrane domain; and an intracellular domain comprising one or more immunoreceptor tyrosine-based activation domains (ITAMs) and/or one or more co-stimulatory domains.

[0015] Disclosed herein are cells transduced by a vector comprising an isolated nucleic acid molecule comprising a nucleic acid sequence encoding a CAR comprising from N-terminus to C-terminus a signal peptide; an antigen binding domain; a hinge domain; a transmembrane domain; an intracellular domain, a cleavage signal; a signal peptide; and a tumor-specific antigen or fragment thereof. Disclosed herein are cells transduced by a vector comprising an isolated nucleic acid molecule comprising a nucleic acid sequence encoding a phosphatidylserine-specific CAR comprising an extracellular domain comprising an antigen binding domain, a transmembrane domain, and an intracellular domain comprising one or more immunostimulatory domains.

[0016] Disclosed herein is a method of treating cancer, the method comprising treating a subject in need thereof by administering to the subject in need thereof a therapeutically effective amount of one or more cells transduced with a disclosed recombinant vector or a pharmaceutical formulation thereof, wherein the one or more cells express a CAR.

[0017] Disclosed herein is a method of treating cancer, the method comprising treating a subject in need thereof by administering to the subject in need thereof a therapeutically effective amount of one or more cells transformed with a disclosed plasmid or a pharmaceutical formulation thereof, wherein the one or more cells express a CAR.

[0018] Disclosed herein is a method of treating cancer, the method comprising treating a subject in need thereof by administering to the subject in need thereof a therapeutically effective amount of one or more genetically modified cells expressing a chimeric antigen receptor targeting phosphatidylserine (PS) or a pharmaceutical formulation thereof.

[0019] Disclosed herein is a method of stimulating an effector cell-mediated immune modulator response to PS-expressing tumor cells, the method comprising administering to a subject in need thereof a therapeutically effective amount of one or more genetically modified cells expressing a chimeric antigen receptor targeting phosphatidylserine (PS) or a pharmaceutical formulation thereof.

### DETAILED DESCRIPTION

[0020] The present disclosure describes formulations, compounded compositions, kits, capsules, containers, and/or methods thereof. It is to be understood that the inventive aspects of which are not limited to specific synthetic methods unless otherwise specified, or to particular reagents unless otherwise specified, as such may, of course, vary. It is also to be understood that the terminology used herein is for the purpose of describing particular aspects only and is not intended to be limiting. Although any methods and materials similar or equivalent to those described herein can be used in the practice or testing of the present invention, example methods and materials are now described.

[0021] All publications mentioned herein are incorporated herein by reference to disclose and describe the methods and/or materials in connection with which the publications are cited. The publications discussed herein are provided solely for their disclosure prior to the filing date of the present application. Nothing herein is to be construed as an admission that the present invention is not entitled to antedate such publication by virtue of prior invention.

### A. Definitions

[0022] Before the present compounds, compositions, articles, systems, devices, and/or methods are disclosed and described, it is to be understood that they are not limited to specific synthetic methods unless otherwise specified, or to particular reagents unless otherwise specified, as such may, of course, vary. It is also to be understood that the terminology used herein is for the purpose of describing particular aspects only and is not intended to be limiting. Although any methods and materials similar or equivalent to those described herein can be used in the practice or testing of the present invention, example methods and materials are now described.

[0023] This disclosure describes inventive concepts with reference to specific examples. However, the intent is to cover all modifications, equivalents, and alternatives of the inventive concepts that are consistent with this disclosure.

[0024] As used in the specification and the appended claims, the singular forms “a”, “an”, and “the” include plural referents unless the context clearly dictates otherwise.

[0025] The phrase “consisting essentially of” limits the scope of a claim to the recited components in a composition or the recited steps in a method as well as those that do not materially affect the basic and novel characteristic or characteristics of the claimed composition or claimed method. The phrase “consisting of” excludes any component, step, or element that is not recited in the claim. The phrase “comprising” is synonymous with “including”, “containing”, or “characterized by”, and is inclusive or open-ended. “Comprising” does not exclude additional, unrecited components or steps.

[0026] As used herein, when referring to any numerical value, the term “about” means a value falling within a range that is ±10% of the stated value.

[0027] Ranges can be expressed herein as from “about” one particular value, and/or to “about” another particular value. When such a range is expressed, a further aspect includes from the one particular value and/or to the other particular value. Similarly, when values are expressed as approximations, by use of the antecedent “about,” it will be understood that the particular value forms a further aspect. It will be further understood that the endpoints of each of the ranges are significant both in relation to the other endpoint and independently of the other endpoint. It is also understood that there are a number of values disclosed herein, and that each value is also herein disclosed as “about” that particular value in addition to the value itself. For example, if the value “10” is disclosed, then “about 10” is also disclosed. It is also understood that each unit between two particular units are also disclosed. For example, if 10 and 15 are disclosed, then 11, 12, 13, and 14 are also disclosed.

[0028] References in the specification and concluding claims to parts by weight of a particular element or component in a composition denotes the weight relationship between the element or component and any other elements or components in the composition or article for which a part by weight is expressed. Thus, in a compound containing 2 parts by weight component X and 5 parts by weight component Y, X and Y are present at a weight ratio of 2:5, and are present in such ratio regardless of whether additional components are contained in the compound.

[0029] As used herein, the terms “optional” or “optionally” means that the subsequently described event or circumstance can or cannot occur, and that the description includes instances where said event or circumstance occurs and instances where it does not. In an aspect, a disclosed method can optionally comprise one or more additional steps, such as, for example, repeating an administering step or altering an administering step.

[0030] As used herein, “operably linked” refers to a juxtaposition where the components described are in a relationship permitting them to function in their intended manner. For example, a control element “operably linked” to a functional element is associated in such a way that expression and/or activity of the functional element is achieved under conditions compatible with the control element. In embodiments, a promotor is operably linked to nucleic acids.

[0031] As used herein, the term “subject” refers to the target of administration, e.g., a human being. The term “subject” also includes domesticated animals (e.g., cats, dogs, etc.), livestock (e.g., cattle, horses, pigs, sheep, goats, etc.), and laboratory animals (e.g., mouse, rabbit, rat, guinea pig, fruit fly, etc.). Thus, the subject of the herein disclosed methods can be a vertebrate, such as a mammal, a fish, a bird, a reptile, or an amphibian. Alternatively, the subject of the herein disclosed methods can be a human, non-human primate, horse, pig, rabbit, dog, sheep, goat, cow, cat, guinea pig, or rodent. The term does not denote a particular age or sex, and thus, adult and child subjects, as well as fetuses, whether male or female, are intended to be covered. In an aspect, a subject can be a human patient. In an aspect, a subject can have cancer, be suspected of having cancer, or be at risk of developing cancer.

[0032] As used herein, the term “diagnosed” means having been subjected to an examination by a person of skill, for example, a physician, and found to have a condition that can be diagnosed or treated by one or more of the disclosed isolated nucleic acid molecules, disclosed vectors, disclosed cells (e.g., disclosed genetically modified cells expressing a chimeric antigen receptor targeting phosphatidylserine (PS) or the disclosed engineered T cells or NK cells or macrophages expressing a chimeric antigen receptor targeting phosphatidylserine (PS)), disclosed pharmaceutical formulations, or a combination thereof, or by one or more of the disclosed methods. For example, “diagnosed with a disease or disorder” means having been subjected to an examination by a person of skill, for example, a physician, and found to have a condition (such as cancer) that can be treated by one or more the disclosed isolated nucleic acid molecules, disclosed vectors, disclosed cells (e.g., disclosed genetically modified cells expressing a chimeric antigen receptor targeting phosphatidylserine (PS) or the disclosed engineered T cells or NK cells or macrophages expressing a chimeric antigen receptor targeting phosphatidylserine (PS)), disclosed pharmaceutical formulations, or a combination thereof, or by one or more of the disclosed methods. For example, “suspected of having a disease or disorder” can mean having been subjected to an examination by a person of skill, for example, a physician, and found to have a condition (such as cancer) that can likely be treated by one or more of the disclosed isolated nucleic acid molecules, disclosed vectors, disclosed cells (e.g., disclosed genetically modified cells expressing a chimeric antigen receptor targeting phosphatidylserine (PS) or the disclosed engineered T cells or NK cells or macrophages expressing a chimeric antigen receptor targeting phosphatidylserine (PS)), disclosed pharmaceutical formulations, or a combination thereof, or by one or more of the disclosed methods. In an aspect, an examination can be physical, can involve various tests (e.g., blood tests, genotyping, biopsies, etc.), scans (e.g., CT scans, PET scans, etc.), and assays (e.g., enzymatic assay), or a combination thereof.

[0033] A “patient” refers to a subject afflicted with a disease or disorder (e.g., cancer). In an aspect, a patient can refer to a subject that has been diagnosed with or is suspected of having a disease or disorder such as cancer. In an aspect, a patient can refer to a subject that has been diagnosed with or is suspected of having a disease or disorder and is seeking treatment or receiving treatment for a disease or disorder (such as cancer).

[0034] As used herein, the phrase “identified to be in need of treatment for a disease or disorder,” or the like, refers to selection of a subject based upon need for treatment of the disease or disorder. For example, a subject can be identified as having a need for treatment of a disease or disorder (e.g., cancer) based upon an earlier diagnosis by a person of skill and thereafter subjected to treatment for the cancer. In an aspect, the identification can be performed by a person different from the person making the diagnosis. In an aspect, the administration can be performed by one who performed the diagnosis.

[0035] As used herein, “activated” and “activation” can refer to the state of a T cell that has been sufficiently stimulated to induce detectable cellular proliferation. Activation can also be associated with induced cytokine production and detectable effector functions. The term “activated T cells” can refer to T cells that are proliferating. Signals generated through the TCR alone may be insufficient for full activation of the T cell and one or more secondary or costimulatory signals may also be required. Thus, T cell activation comprises a primary stimulation signal through the TCR/CD3 complex and one or more secondary costimulatory signals. Costimulation can be evidenced by proliferation and/or cytokine production by T cells that have received a primary activation signal, such as stimulation through the TCR/CD3 complex.

[0036] As used herein, “inhibit,” “inhibiting”, and “inhibition” mean to diminish or decrease an activity, level, response, condition, severity, disease, or other biological parameter. This can include, but is not limited to, the complete ablation of the activity, level, response, condition, severity, disease, or other biological parameter. This can also include, for example, a 10% inhibition or reduction in the activity, level, response, condition, severity, disease, or other biological parameter as compared to the native or control level (e.g., a subject not receiving the disclosed isolated nucleic acid molecules, disclosed vectors, disclosed cells (e.g., disclosed genetically modified cells expressing a chimeric antigen receptor targeting phosphatidylserine (PS) or the disclosed engineered T cells or NK cells or macrophages expressing a chimeric antigen receptor targeting phosphatidylserine (PS)), disclosed pharmaceutical formulations, or a combination thereof). Thus, in an aspect, the inhibition or reduction can be a 10%, 20%, 30%, 40%, 50%, 60%, 70%, 80%, 90%, 100%, or any amount of reduction in between as compared to native or control levels. In an aspect, the inhibition or reduction can be 10-20%, 20-30%, 30-40%, 40-50%, 50-60%, 60-70%, 70-80%, 80-90%, or 90-100% as compared to a native or control level (e.g., a subject not receiving the disclosed isolated nucleic acid molecules, disclosed vectors, disclosed cells (e.g., disclosed genetically modified cells expressing a chimeric antigen receptor targeting phosphatidylserine (PS) or the disclosed engineered T cells or NK cells or macrophages expressing a chimeric antigen receptor targeting phosphatidylserine (PS)), disclosed pharmaceutical formulations, or a combination thereof). In an aspect, the inhibition or reduction can be 0-25%, 25-50%, 50-75%, or 75-100% as compared to native or control levels. In an aspect, a native or control level can be a pre-disease or pre-disorder level (such as a pre-cancer state).

[0037] The words “treat” or “treating” or “treatment” include palliative treatment, that is, treatment designed for the relief of symptoms rather than the curing of the disease, pathological condition, or disorder; preventative treatment, that is, treatment directed to minimizing or partially or completely inhibiting the development of the associated disease, pathological condition, or disorder; and supportive treatment, that is, treatment employed to supplement another specific therapy directed toward the improvement of the associated disease, pathological condition, or disorder. In an aspect, the terms cover any treatment of a subject, including a mammal (e.g., a human), and includes: (i) preventing the undesired physiological change, disease, pathological condition, or disorder from occurring in a subject that can be predisposed to the disease but has not yet been diagnosed as having it; (ii) inhibiting the physiological change, disease, pathological condition, or disorder, i.e., arresting its development; or (iii) relieving the physiological change, disease, pathological condition, or disorder, i.e., causing regression of the disease. For example, in an aspect, treating a disease or disorder can reduce the severity of an established a disease or disorder in a subject by 1%-100% as compared to a control (such as, for example, an individual not having cancer). In an aspect, treating can refer to a 1%, 2%, 3%, 4%, 5%, 6%, 7%, 8%, 9%, 10%, 20%, 30%, 40%, 50%, 60%, 70%, 80%, 90%, or 100% reduction in the severity of a disease or disorder (such as cancer). For example, treating a disease or disorder can reduce one or more symptoms of a disease or disorder in a subject by 1%-100% as compared to a control (such as, for example, an individual not having cancer). In an aspect, treating can refer to 1%, 2%, 3%, 4%, 5%, 6%, 7%, 8%, 9%, 10%, 20%, 30%, 40%, 50%, 60%, 70%, 80%, 90%, 100% reduction of one or more symptoms of an established a disease or disorder. It is understood that treatment does not necessarily refer to a cure or complete ablation or eradication of a disease or disorder. However, in an aspect, treatment can refer to a cure or complete ablation or eradication of a disease or disorder (such as cancer).

[0038] As used herein, the term “prevent” or “preventing” or “prevention” refers to precluding, averting, obviating, forestalling, stopping, or hindering something from happening, especially by advance action. It is understood that where reduce, inhibit, or prevent are used herein, unless specifically indicated otherwise, the use of the other two words is also expressly disclosed. In an aspect, preventing a disease or disorder having chromatin deregulation and/or chromatin dysregulation is intended. The words “prevent”, “preventing”, and “prevention” also refer to prophylactic or preventative measures for protecting or precluding a subject (e.g., an individual) not having a given a disease or disorder (such as cancer) or related complication from progressing to that complication. In an aspect, preventing metastasis is intended.

[0039] As used herein, the terms “administering” and “administration” refer to any method of providing one or more of the disclosed interfering molecules, the disclosed anti-PD1 molecules, the disclosed pharmaceutical formulations, or a combination thereof to a subject. Such methods are well known to those skilled in the art and include, but are not limited to, the following: oral administration, transdermal administration, administration by inhalation, nasal administration, topical administration, in utero administration, intratumoral administeraiton, intrahepatic administration, intravaginal administration, ophthalmic administration, intraaural administration, otic administration, intracerebral administration, rectal administration, sublingual administration, buccal administration, and parenteral administration, including injectable such as intravenous administration, intra-CSF administration, intra-arterial administration, intramuscular administration, and subcutaneous administration. Administration can also include hepatic intra-arterial administration or administration through the hepatic portal vein (HPV). Administration of a disclosed composition, a disclosed pharmaceutical composition, a disclosed therapeutic agent, a disclosed immune modulator, a disclosed proteasome inhibitor, a disclosed small molecule, a disclosed endonuclease, a disclosed oligonucleotide, a disclosed RNA therapeutic, or any combination thereof can comprise administration directly into the CNS or the PNS. Administration can be continuous or intermittent. Administration can comprise a combination of one or more routes.

[0040] In an aspect, the skilled person can determine an efficacious dose, an efficacious schedule, and an efficacious route of administration for the disclosed isolated nucleic acid molecules, disclosed vectors, disclosed cells (e.g., disclosed genetically modified cells expressing a chimeric antigen receptor targeting phosphatidylserine (PS) or the disclosed engineered T cells or NK cells or macrophages expressing a chimeric antigen receptor targeting phosphatidylserine (PS)), disclosed pharmaceutical formulations, or a combination thereof to treat or prevent a disease or disorder (such as cancer). In an aspect, the skilled person can also alter, change, or modify an aspect of an administering step to improve efficacy of the disclosed isolated nucleic acid molecules, disclosed vectors, disclosed cells (e.g., disclosed genetically modified cells expressing a chimeric antigen receptor targeting phosphatidylserine (PS) or the disclosed engineered T cells or NK cells or macrophages expressing a chimeric antigen receptor targeting phosphatidylserine (PS)), disclosed pharmaceutical formulations, or a combination thereof.

[0041] By “determining the amount” is meant both an absolute quantification of a particular analyte (e.g., biomarker for cancer, for example) or a determination of the relative abundance of a particular analyte (e.g., a cancer biomarker). The phrase includes both direct or indirect measurements of abundance or both.

[0042] As used herein, “modifying the method” can comprise modifying or changing one or more features or aspects of one or more steps of a disclosed method. In an aspect, a method can be altered by changing the amount of the disclosed isolated nucleic acid molecules, disclosed vectors, disclosed cells (e.g., disclosed genetically modified cells expressing a chimeric antigen receptor targeting phosphatidylserine (PS) or the disclosed engineered T cells or NK cells or macrophages expressing a chimeric antigen receptor targeting phosphatidylserine (PS)), disclosed pharmaceutical formulations, or a combination thereof administered to a subject, or by changing the frequency of administration of the disclosed isolated nucleic acid molecules, disclosed vectors, disclosed cells (e.g., disclosed genetically modified cells expressing a chimeric antigen receptor targeting phosphatidylserine (PS) or the disclosed engineered T cells or NK cells or macrophages expressing a chimeric antigen receptor targeting phosphatidylserine (PS)), disclosed pharmaceutical formulations, or a combination thereof to a subject, by changing the duration of time that the disclosed isolated nucleic acid molecules, disclosed vectors, disclosed cells (e.g., disclosed genetically modified cells expressing a chimeric antigen receptor targeting phosphatidylserine (PS) or the disclosed engineered T cells or NK cells or macrophages expressing a chimeric antigen receptor targeting phosphatidylserine (PS)), disclosed pharmaceutical formulations, or a combination thereof is administered to a subject, or by substituting for one or more of the disclosed components and/or reagents with a similar or equivalent component and/or reagent. The same applies to all disclosed isolated nucleic acid molecules, disclosed vectors, disclosed cells (e.g., disclosed genetically modified cells expressing a chimeric antigen receptor targeting phosphatidylserine (PS) or the disclosed engineered T cells or NK cells or macrophages expressing a chimeric antigen receptor targeting phosphatidylserine (PS)), disclosed pharmaceutical formulations, or combinations thereof.

[0043] As used herein, the term “pharmaceutically acceptable carrier” refers to sterile aqueous or nonaqueous solutions, dispersions, suspensions or emulsions, as well as sterile powders for reconstitution into sterile injectable solutions or dispersions just prior to use. Examples of suitable aqueous and nonaqueous carriers, diluents, solvents, or vehicles include water, ethanol, polyols (such as glycerol, propylene glycol, polyethylene glycol and the like), carboxymethylcellulose and suitable mixtures thereof, vegetable oils (such as olive oil) and injectable organic esters such as ethyl oleate. In an aspect, a pharmaceutical carrier employed can be a solid, liquid, or gas. In an aspect, examples of solid carriers can include lactose, terra alba, sucrose, talc, gelatin, agar, pectin, acacia, magnesium stearate, and stearic acid. In an aspect, examples of liquid carriers can include sugar syrup, peanut oil, olive oil, and water. In an aspect, examples of gaseous carriers can include carbon dioxide and nitrogen. In preparing a disclosed composition for oral dosage form, any convenient pharmaceutical media can be employed. For example, water, glycols, oils, alcohols, flavoring agents, preservatives, coloring agents and the like can be used to form oral liquid preparations such as suspensions, elixirs and solutions; while carriers such as starches, sugars, microcrystalline cellulose, diluents, granulating agents, lubricants, binders, disintegrating agents, and the like can be used to form oral solid preparations such as powders, capsules and tablets. Because of their ease of administration, tablets and capsules are the preferred oral dosage units whereby solid pharmaceutical carriers are employed. Optionally, tablets can be coated by standard aqueous or nonaqueous techniques. Proper fluidity can be maintained, for example, by the use of coating materials such as lecithin, by the maintenance of the required particle size in the case of dispersions and by the use of surfactants. These compositions can also contain adjuvants such as preservatives, wetting agents, emulsifying agents and dispersing agents. Prevention of the action of microorganisms can be ensured by the inclusion of various antibacterial and antifungal agents such as paraben, chlorobutanol, phenol, sorbic acid and the like. It can also be desirable to include isotonic agents such as sugars, sodium chloride and the like. Prolonged absorption of the injectable pharmaceutical form can be brought about by the inclusion of agents, such as aluminum monostearate and gelatin, which delay absorption. Injectable depot forms are made by forming microencapsule matrices of the drug in biodegradable polymers such as polylactide-polyglycolide, poly(orthoesters) and poly(anhydrides). Depending upon the ratio of drug to polymer and the nature of the particular polymer employed, the rate of drug release can be controlled. Depot injectable formulations are also prepared by entrapping the drug in liposomes or microemulsions that are compatible with body tissues. The injectable formulations can be sterilized, for example, by filtration through a bacterial-retaining filter or by incorporating sterilizing agents in the form of sterile solid compositions which can be dissolved or dispersed in sterile water or other sterile injectable media just prior to use. Suitable inert carriers can include sugars such as lactose. Desirably, at least 95% by weight of the particles of the active ingredient have an effective particle size in the range of 0.01 to 10 micrometers.

[0044] As used herein, the term “excipient” refers to an inert substance which is commonly used as a diluent, vehicle, preservative, binder, or stabilizing agent, and includes, but is not limited to, proteins (e.g., serum albumin, etc.), amino acids (e.g., aspartic acid, glutamic acid, lysine, arginine, glycine, histidine, etc.), fatty acids and phospholipids (e.g., alkyl sulfonates, caprylate, etc.), surfactants (e.g., SDS, polysorbate, nonionic surfactant, etc.), saccharides (e.g., sucrose, maltose, trehalose, etc.) and polyols (e.g., mannitol, sorbitol, etc.). See, also, for reference, Remington″s Pharmaceutical Sciences, (1990) Mack Publishing Co., Easton, Pa., which is hereby incorporated by reference in its entirety.

[0045] A “transposon” is a mobile genetic element that efficiently moves between vectors and chromosomes using the “cut and paste” or “copy and paste” mechanism. During transposase transposition (for example, PB transposase in the PiggyBac transposon system) recognizes transposon-specific sequences of inverted terminal repeats (ITRs) located at both ends of the transposon (there are 5′- and 3′-ITRs in any transposon system), it moves the contents from source sites and embeds them in chromosomal sites, such as TTAA chromosomal sites. In an aspect, the powerful activity of the PiggyBac transposon system makes it easy to transfer genes of interest located between two ITRs to target genomes. The transposon can be divided into Class I transposon (retrotransposon) and Class II transposon (DNA transposon). In Class I transposon, after RNA is transcribed from nucleic acid in a cell or from transposon DNA on the animal genome, the DNA reverse-transcribed from the RNA is transferred to another location on the animal genome. It works by inserting it. Class II transposon cuts nucleic acid in cells or transposon DNA on the animal genome, and then inserts the cut transposon DNA into another location on the animal genome. The Class II transposon may include a first polynucleotide at a 5′ end, a second polynucleotide at a 3′ end, and a third polynucleotide. The first polynucleotide and the second polynucleotide may include an inverted terminal repeat (ITR) sequence. The third polynucleotide may be located between the first polynucleotide and the second polynucleotide. The third polynucleotide may include an exo-polynucleotide. The third polynucleotide may include a polynucleotide encoding a transposase. Unless otherwise specified below, the term “transposon” assumes the case of Class II transposon, but even if the term “transposon” is interpreted as Class I transposon, it is technically If there is no problem, it will not be necessary to limit the interpretation to Class II transposon.

[0046] As used herein, “concurrently” means (1) simultaneously in time, or (2) at different times during the course of a common treatment schedule.

[0047] The term “contacting” as used herein refers to bringing one or more of the disclosed interfering molecules, the disclosed anti-PD1 molecules, the disclosed pharmaceutical formulations, the disclosed anti-chemokines, the disclosed anti-cancer agents, the disclosed chemotherapeutics, or a combination thereof together with a target area or intended target area in such a manner that the disclosed interfering molecules, the disclosed anti-PD1 molecules, the disclosed pharmaceutical formulations, the disclosed anti-chemokines, the disclosed anti-cancer agents, the disclosed chemotherapeutics, or a combination thereof can exert an effect on the intended target or targeted area either directly or indirectly. A target area or intended target area can be one or more of a subject's organs (e.g., lungs, heart, liver, kidney, brain, etc.) hosting cancerous cells. In an aspect, a target area or intended target area can be any cell or any organ infected by a disease or disorder (such as cancer). In an aspect, a target area or intended target area can be any organ, tissue, or cells that are affected by a disease or disorder (such as cancer).

[0048] As used herein, “determining” can refer to measuring or ascertaining the presence and severity of a disease or disorder, such as, for example, cancer. Methods and techniques used to determine the presence and/or severity of a disease or disorder are typically known to the medical arts. For example, the art is familiar with the ways to identify and/or diagnose the presence, severity, or both of a disease or disorder (such as, for example, cancer).

[0049] As used herein, “effective amount” and “amount effective” can refer to an amount that is sufficient to achieve the desired result such as, for example, the treatment and/or prevention of a disease or disorder (e.g., a cancer) or a suspected disease or disorder. As used herein, the terms “effective amount” and “amount effective” can refer to an amount that is sufficient to achieve the desired an effect on an undesired condition (e.g., a cancer). For example, a “therapeutically effective amount” refers to an amount that is sufficient to achieve the desired therapeutic result or to have an effect on undesired symptoms, but is generally insufficient to cause adverse side effects. In an aspect, “therapeutically effective amount” means an amount of a disclosed isolated nucleic acid molecule, a disclosed vector, a disclosed cell, or a disclosed pharmaceutical formulation; that (i) treats the particular disease, condition, or disorder (e.g., a cancer), (ii) attenuates, ameliorates, or eliminates one or more symptoms of the particular disease, condition, or disorder e.g., cancer), or (iii) delays the onset of one or more symptoms of the particular disease, condition, or disorder described herein (e.g., cancer). The specific therapeutically effective dose level for any particular patient will depend upon a variety of factors including the disorder being treated and the severity of the disorder; the disclosed isolated nucleic acid molecules, disclosed vectors, disclosed cells (e.g., disclosed genetically modified cells expressing a chimeric antigen receptor targeting phosphatidylserine (PS) or the disclosed engineered T cells or NK cells or macrophages expressing a chimeric antigen receptor targeting phosphatidylserine (PS)), disclosed pharmaceutical formulations, or a combination thereof employed; the disclosed methods employed; the age, body weight, general health, sex and diet of the patient; the time of administration; the route of administration; the rate of excretion of the disclosed isolated nucleic acid molecules, disclosed vectors, disclosed cells (e.g., disclosed genetically modified cells expressing a chimeric antigen receptor targeting phosphatidylserine (PS) or the disclosed engineered T cells or NK cells or macrophages expressing a chimeric antigen receptor targeting phosphatidylserine (PS)), disclosed pharmaceutical formulations, or a combination thereof employed; the duration of the treatment; drugs used in combination or coincidental with the disclosed isolated nucleic acid molecules, disclosed vectors, disclosed cells (e.g., disclosed genetically modified cells expressing a chimeric antigen receptor targeting phosphatidylserine (PS) or the disclosed engineered T cells or NK cells or macrophages expressing a chimeric antigen receptor targeting phosphatidylserine (PS)), disclosed pharmaceutical formulations, or a combination thereof employed, and other like factors well known in the medical arts. For example, it is well within the skill of the art to start doses of the disclosed isolated nucleic acid molecules, disclosed vectors, disclosed cells (e.g., disclosed genetically modified cells expressing a chimeric antigen receptor targeting phosphatidylserine (PS) or the disclosed engineered T cells or NK cells or macrophages expressing a chimeric antigen receptor targeting phosphatidylserine (PS)), disclosed pharmaceutical formulations, or a combination thereof at levels lower than those required to achieve the desired therapeutic effect and to gradually increase the dosage until the desired effect is achieved. If desired, then the effective daily dose can be divided into multiple doses for purposes of administration. Consequently, a single dose of the disclosed isolated nucleic acid molecules, disclosed vectors, disclosed cells (e.g., disclosed genetically modified cells expressing a chimeric antigen receptor targeting phosphatidylserine (PS) or the disclosed engineered T cells or NK cells or macrophages expressing a chimeric antigen receptor targeting phosphatidylserine (PS)), disclosed pharmaceutical formulations, or a combination thereof can contain such amounts or submultiples thereof to make up the daily dose. The dosage can be adjusted by the individual physician in the event of any contraindications. Dosage can vary, and can be administered in one or more dose administrations daily, for one or several days. Guidance can be found in the literature for appropriate dosages for given classes of pharmaceutical products. In further various aspects, a preparation can be administered in a “prophylactically effective amount”; that is, an amount effective for prevention of a disease or condition, such as, for example, a disease or disorder due to a missing, deficient, and/or mutant protein or enzyme.

[0050] The term “antibody” (Ab) includes, without limitation, a glycoprotein immunoglobulin that binds specifically to an antigen. An antibody can comprise at least two heavy (H) chains and two light (L) chains interconnected by disulfide bonds, or an antigen-binding molecule thereof. Each H chain can comprise a heavy chain variable region (abbreviated herein as VH) and a heavy chain constant region. The heavy chain constant region can comprise three constant domains, CH1, CH2 and CH3. Each light chain can comprise a light chain variable region (abbreviated herein as VL) and a light chain constant region. The light chain constant region can comprise one constant domain, CL. The VH and VL regions can be further subdivided into regions of hypervariability, termed complementarity determining regions (CDRs), interspersed with regions that are more conserved, termed framework regions (FR). Each VH and VL can comprise three CDRs and four FRs, arranged from amino-terminus to carboxy-terminus in the following order: FR1, CDR1, FR2, CDR2, FR3, CDR3, and FR4. The variable regions of the heavy and light chains can contain a binding domain that interacts with an antigen. The constant regions of the Abs can mediate the binding of the immunoglobulin to host tissues or factors, including various cells of the immune system (e.g., effector cells) and the first component (Clq) of the classical complement system. Generally, human antibodies can be approximately 150 kD tetrameric agents composed of two identical heavy (H) chain polypeptides (about 50 kD each) and two identical light (L) chain polypeptides (about 25 kD each) that associate with each other into what is commonly referred to as a “Y-shaped” structure. The heavy and light chains can be linked or connected to one another by a single disulfide bond and two other disulfide bonds can connect the heavy chain hinge regions to one another, so that the dimers can be connected to one another and the tetramer can be formed. Naturally produced antibodies are also glycosylated, e.g., on the CH2 domain. The term “antibody” is used to mean an immunoglobulin molecule that recognizes and specifically binds to a target, such as a protein, polypeptide, peptide, carbohydrate, polynucleotide, lipid, or combinations of the foregoing etc., through at least one antigen recognition site within the variable region of the immunoglobulin molecule. As used herein, the term encompasses intact polyclonal antibodies, intact monoclonal antibodies, antibody fragments (such as Fab, Fab′, F (ab′) 2, and Fv fragments), single chain Fv (scFv) mutants, multispecific antibodies such as bispecific antibodies generated from at least two intact antibodies, fusion proteins comprising an antibody portion, and any other modified immunoglobulin molecule comprising an antigen recognition site so long as the antibodies exhibit the desired biological activity. An antibody can be of any the five major classes of immunoglobulins: IgA, IgD. IgE, IgG, and IgM, or subclasses (isotypes) thereof (e.g., IgG1. IgG2, IgG3. IgG4, IgA1 and IgA2), based on the identity of their heavy-chain constant domains referred to as alpha, delta, epsilon, gamma, and mu, respectively. The different classes of immunoglobulins have different and well-known subunit structures and three-dimensional configurations. Antibodies can be naked or conjugated to—other molecules such as toxins, radioisotopes, etc.

[0051] The term “variable region” or “variable domain” is used interchangeably. The variable region typically refers to a portion of an antibody, generally, a portion of a light or heavy chain, typically about the amino-terminal 110 to 120 amino acids in the mature heavy chain and about 90 to 115 amino acids in the mature light chain, which differ extensively in sequence among antibodies and are used in the binding and specificity of a particular antibody for its particular antigen. The variability in sequence is concentrated in those regions called complementarity determining regions (CDRs) while the more highly conserved regions in the variable domain are called framework regions (FR). Without wishing to be bound by any particular mechanism or theory, it is believed that the CDRs of the light and heavy chains are primarily responsible for the interaction and specificity of the antibody with antigen. In certain embodiments, the variable region is a human variable region. In certain embodiments, the variable region comprises rodent or murine CDRs and human framework regions (FRs). In embodiments, the variable region is a primate (e.g., non-human primate) variable region. In certain embodiments, the variable region comprises rodent or murine CDRs and primate framework regions (FRs).

[0052] The terms “VL” and “VL domain” are used interchangeably to refer to the light chain variable region of an antibody or an antigen-binding molecule thereof. The terms “VH” and “VH domain” are used interchangeably to refer to the heavy chain variable region of an antibody or an antigen-binding molecule thereof.

[0053] The terms “constant region” and “constant domain” are interchangeable and have a meaning common in the art. The constant region is an antibody portion, e.g., a carboxyl terminal portion of a light and/or heavy chain which is not directly involved in binding of an antibody to antigen but which can exhibit various effector functions, such as interaction with the Fc receptor. The constant region of an immunoglobulin molecule generally has a more conserved amino acid sequence relative to an immunoglobulin variable domain.

[0054] The term “heavy chain” when used in reference to an antibody can refer to any distinct type, e.g., alpha (a), delta (6), epsilon (E), gamma (y) and mu (p), based on the amino acid sequence of the constant domain, which give rise to IgA, IgD, IgE, IgG and IgM classes of antibodies, respectively, including subclasses of IgG, e.g., IgG1, IgG2, IgG3 and IgG4.

[0055] The term “light chain” when used in reference to an antibody can refer to any distinct type, e.g., kappa (K) or lambda (A) based on the amino acid sequence of the constant domains. Light chain amino acid sequences are well known in the art. In specific embodiments, the light chain is a human light chain.

[0056] “Endogenous” with reference to a gene, protein, and/or nucleic acid refers to the natural presence of that gene, protein, and/or nucleic acid in a cell, such as an immune cell.

[0057] “Exogenous” refers to an introduced agent, such as a nucleic acid, gene, or protein, into a cell, for example from an outside source. A nucleic acid introduced into a cell is exogenous even if it encodes a protein which is naturally found in the cell. Such exogenous introduction of a nucleic acid encoding a protein can be used to increase the expression of the protein over the level that would naturally be found in the cell under similar conditions, e.g., without introduction of the exogenous nucleic acid.

[0058] A “T cell receptor” or “TCR” refers to antigen-recognition molecules present on the surface of T cells. During normal T cell development, each of the four TCR genes, a, 0., y, and 6, may rearrange leading to highly diverse TCR proteins.

[0059] As used herein, “effector function” can refer to a biological result of interaction of an antibody Fc region with an Fc receptor or ligand. Effector functions comprise, without limitation, antibody-dependent cell-mediated cytotoxicity (ADCC), antibody-dependent cell-mediated phagocytosis (ADCP), and complement mediated cytotoxicity (CMC). An effector function may be antigen binding dependent, antigen binding independent, or both. ADCC refers to lysis of antibody-bound target cells by immune effector cells. Without wishing to be bound by any theory, ADCC is generally understood to involve Fc receptor (FcR)-bearing effector cells recognizing and subsequently killing antibody-coated target cells (e.g., cells that express on their surface antigens to which an antibody is bound). Effector cells that mediate ADCC may comprise immune cells, comprising yet not limited to, one or more of natural killer (NK) cells, macrophages, neutrophils, eosinophils.

[0060] The term “immunotherapy” refers to the treatment of a subject afflicted with, or at risk of contracting or suffering a recurrence of, a disease by a method comprising inducing, enhancing, suppressing or otherwise modifying an immune response. Examples of immunotherapy can include, but are not limited to, NK cells and T cell therapies. T cell therapy can include adoptive T cell therapy, tumor-infiltrating lymphocyte (TIL) immunotherapy, autologous cell therapy, engineered autologous cell therapy (eACTTM), and allogeneic T cell transplantation. However, one of skill in the art would recognize that the conditioning methods disclosed herein would enhance the effectiveness of any transplanted T cell therapy.

[0061] The T cells or NK cells of the immunotherapy can come from any source known in the art. For example, T cells and NK cells can be differentiated in vitro from a hematopoietic stem cell population (for example iPSCs) or can be obtained from a subject. T cells and NK cells can be obtained from, e.g., peripheral blood mononuclear cells (PBMCs), bone marrow, lymph node tissue, cord blood, thymus tissue, tissue from a site of infection, ascites, pleural effusion, spleen tissue, and tumors. In addition, the T cells can be derived from one or more T cell lines available in the art. T cells can also be obtained from a unit of blood collected from a subject using any number of techniques known to the skilled artisan.

[0062] As used herein, the term “antibody fragment” refers to a portion of an intact antibody and refers to the antigenic determining variable regions of an intact antibody. Examples of antibody fragments include, but are not limited to Fab, Fab′, F(ab′)2, and Fv fragments, linear antibodies, single chain antibodies, and multi-specific antibodies formed from antibody fragments.

[0063] A “monoclonal antibody” as used herein refers to homogenous antibody population involved in the highly specific recognition and binding of a single antigenic determinant, or epitope. This is in contrast to polyclonal antibodies that typically include different antibodies directed against different antigenic determinants. The term “monoclonal antibody” encompasses both intact and full-length monoclonal antibodies as well as antibody fragments (such as Fab, Fab′, F(ab′)2, Fv), single chain (scFv) mutants, fusion proteins comprising an antibody portion, and any other modified immunoglobulin molecule comprising an antigen recognition site. Furthermore, “monoclonal antibody” refers to such antibodies made in any number of manners including, but not limited to, by hybridoma, phage selection, recombinant expression, and transgenic animals.

[0064] As used herein, the term “humanized antibody” refers to forms of non-human (e.g., murine) antibodies that are specific immunoglobulin chains, chimeric immunoglobulins, or fragments thereof that contain minimal non-human sequences. Typically, humanized antibodies are human immunoglobulins in which residues from the complementary determining region (CDR) are replaced by residues from the CDR of a non-human species (e.g., mouse, rat, rabbit, hamster, etc.) that have the desired specificity, affinity, and capability. In some instances, the Fv framework region (FR) residues of a human immunoglobulin are replaced with the corresponding residues in an antibody from a non-human species that has the desired specificity, affinity, and capability. The humanized antibody can be further modified by the substitution of additional residue either in the Fv framework region and/or within the replaced non-human residues to refine and optimize antibody specificity, affinity, and/or capability. In general, the humanized antibody will comprise substantially all of at least one, and typically two or three, variable domains containing all or substantially all of the CDR regions that correspond to the non-human immunoglobulin whereas all or substantially all of the FR regions are those of a human immunoglobulin consensus sequence. The humanized antibody can also comprise at least a portion of an immunoglobulin constant region or domain (Fc), typically that of a human immunoglobulin.

[0065] That an antibody “selectively binds” or “specifically binds” to an epitope or receptor means that the antibody reacts or associates more frequently, more rapidly, with greater duration, with greater affinity, or with some combination of the above to the epitope or receptor than with alternative substances, including unrelated proteins. “Selectively binds” or “specifically binds” means, for instance, that an antibody binds to a protein with a K_{D} of about 0.1 mM or less, more usually about 1 μM or less. “Selectively binds” or “specifically binds” means at times that an antibody binds to a protein with a K_{D} of about 0.1 mM or less, at times about 1 μM or less, at times about 0.1 μM or less, at times about 0.01 μM or less, and at times about 1 nM or less. It is understood that, in certain embodiments, an antibody or binding moiety that specifically binds to a first target may or may not specifically bind to a second target. As such, “specific binding” does not necessarily require (although it can include) exclusive binding, e.g., binding to a single target. Thus, an antibody may, in an aspect, specifically bind to more than one target (e.g., human phosphatidylserine or PS). In an aspect, the multiple targets may be bound by the same antigen-binding site on the antibody. For example, an antibody may, in certain instances, comprise two identical antigen-binding sites, each of which specifically binds two or more human Notch receptors (e.g., human PS).

[0066] An “antigen” refers to a compound, composition, or substance that may stimulate the production of antibodies or a T cell response in a human or animal, including compositions (such as one that includes a tumor-specific protein) that are injected or absorbed into a human or animal. An antigen reacts with the products of specific humoral or cellular immunity, including those induced by heterologous antigens, such as the disclosed antigens. A “target antigen” or “target antigen of interest” is an antigen that is not substantially found on the surface of other normal (desired) cells and to which a binding domain of a TCR or CAR contemplated herein, is designed to bind.

[0067] A “target” is any molecule bound by a binding motif, CAR, TCR or antigen binding agent, e.g., an antibody.

[0068] “Antigen-specific targeting region” (ASTR) refers to the region of the CAR or TCR which targets specific antigens. The targeting regions on the CAR or TCR are extracellular (for example, phosphatidylserine). In some embodiments, the antigen-specific targeting regions comprise an antibody or a functional equivalent thereof or a fragment thereof or a derivative thereof and each of the targeting regions target a different antigen. The targeting regions may comprise full length heavy chain, Fab fragments, single chain Fv (scFv) fragments, divalent single chain antibodies or diabodies, each of which are specific to the target antigen.

[0069] The term “autologous” refers to any material derived from the same individual to which it is later to be re-introduced. For example, a subject's own cells can be obtained, made to express one or more disclosed CARs, and then administered to the same subject.

[0070] As used herein, the term “antibody production” can have both general and specific meanings. In the broad sense, it can refer to the entire process of creating a usable specific antibody, including steps of immunogen preparation, immunization, hybridoma creation, collection, screening, isotyping, purification, and labeling for direct use in a particular method. In the more restricted sense, antibody production refers to the steps leading up to antibody generation but does not include various forms of purifying and labeling the antibody for particular uses. Antibody production involves preparation of antigen samples and their safe injection into laboratory or farm animals to evoke high expression levels of antigen-specific antibodies in the serum, which can then be recovered from the animal. Polyclonal antibodies are recovered directly from serum (bleeds). Monoclonal antibodies are produced by fusing antibody-secreting spleen cells from immunized mice with immortal myeloma cell to create monoclonal hybridoma cell lines that express the specific antibody in cell culture supernatant. Successful antibody production depends upon careful planning and implementation with respect to several important steps and considerations: (i) synthesize or purify the target antigen (e.g., peptide or hapten); (ii) choose an appropriate immunogenic carrier protein; (iii) conjugate the antigen and carrier protein to create the immunogen; immunize animals using appropriate schedule and adjuvant formula; and screen serum (or hybridoma) for antibody titer and isotype (also called antibody characterization).

[0071] As used herein, “RNA therapeutics” can refer to the use of oligonucleotides to target RNA. RNA therapeutics can offer the promise of uniquely targeting the precise nucleic acids involved in a particular disease with greater specificity, improved potency, and decreased toxicity. This could be particularly powerful for genetic diseases where it is most advantageous to aim for the RNA as opposed to the protein. In an aspect, a therapeutic RNA can comprise one or more expression sequences. As known to the art, expression sequences can comprise an RNAi, shRNA, mRNA, non-coding RNA (ncRNA), an antisense such as an antisense RNA, miRNA, morpholino oligonucleotide, peptide-nucleic acid (PNA) or ssDNA (with natural, and modified nucleotides, including but not limited to, LNA, BNA, 2′-O-Me-RNA, 2′-MEO-RNA, 2′-F-RNA), or analog or conjugate thereof. In an aspect, a disclosed therapeutic RNA can comprise one or more long non-coding RNA (lncRNA), such as, for example, a long intergenic non-coding RNA (lincRNA), pre-transcript, pre-miRNA, pre-mRNA, competing endogenous RNA (ceRNA), small nuclear RNA (snRNA), small nucleolar RNA (snoRNA), pseudo-gene, rRNA, or tRNA. In an aspect, ncRNA can be piwi-interacting RNA (piRNA), primary miRNA (pri-miRNA), or premature miRNA (pre-miRNA). In an aspect, a disclosed therapeutic RNA or an RNA therapeutic can comprise antisense oligonucleotides (ASOs) that inhibit mRNA translation, oligonucleotides that function via RNA interference (RNAi) pathway, RNA molecules that behave like enzymes (ribozymes), RNA oligonucleotides that bind to proteins and other cellular molecules, and ASOs that bind to mRNA and form a structure that is recognized by RNase H resulting in cleavage of the mRNA target. In an aspect, RNA therapeutics can comprise RNAi and ASOs that inhibit mRNA translation. Generally speaking, as known to the art, RNAi operates sequence specifically and post-transcriptionally by activating ribonucleases which, along with other enzymes and complexes, coordinately degrade the RNA after the original RNA target has been cut into smaller pieces while antisense oligonucleotides bind to their target nucleic acid via Watson-Crick base pairing, and inhibit or alter gene expression via steric hindrance, splicing alterations, initiation of target degradation, or other events.

[0072] As used herein, the terms “cancer” and “cancerous” refer to or describe the physiological condition in mammals in which a population of cells are characterized by unregulated cell growth. Examples of cancer include, but are not limited to, carcinoma, lymphoma, blastoma, sarcoma, and leukemia. More particular examples of such cancers include squamous cell cancer, small-cell lung cancer, non-small cell lung cancer, adenocarcinoma of the lung, squamous carcinoma of the lung, cancer of the peritoneum, hepatocellular cancer, gastrointestinal cancer, pancreatic cancer, glioblastoma, cervical cancer, ovarian cancer, liver cancer, bladder cancer, hepatoma, breast cancer, colon cancer, colorectal cancer, endometrial or uterine carcinoma, salivary gland carcinoma, kidney cancer, liver cancer, prostate cancer, vulval cancer, thyroid cancer, hepatic carcinoma and various types of head and neck cancer.

[0073] The terms “proliferative disorder” and “proliferative disease” refer to disorders associated with abnormal cell proliferation such as cancer.

[0074] “Tumor” and “neoplasm” as used herein refer to any mass of tissue that result from excessive cell growth or proliferation, either benign (noncancerous) or malignant (cancerous) including pre-cancerous lesions. “Metastasis” as used herein refers to the process by which a cancer spreads or transfers from the site of origin to other regions of the body with the development of a similar cancerous lesion at the new location. A “metastatic” or “metastasizing” cell is one that loses adhesive contacts with neighboring cells and migrates via the bloodstream or lymph from the primary site of disease to invade neighboring body structures.

[0075] The terms “cancer stem cell” or “tumor stem cell” or “solid tumor stem cell” are used interchangeably herein and refer to a population of cells from a solid tumor that: (1) have extensive proliferative capacity; (2) are capable of asymmetric cell division to generate one or more kinds of differentiated progeny with reduced proliferative or developmental potential; and (3) are capable of symmetric cell divisions for self-renewal or self-maintenance. These properties of “cancer stem cells” or “tumor stem cells” or “solid tumor stem cells” confer on those cancer stem cells the ability to form palpable tumors upon serial transplantation into an immunocompromised mouse compared to the majority of tumor cells that fail to form tumors. Cancer stem cells undergo self-renewal versus differentiation in a chaotic manner to form tumors with abnormal cell types that can change over time as mutations occur.

[0076] The terms “cancer cell” or “tumor cell” and grammatical equivalents refer to the total population of cells derived from a tumor including both non-tumorigenic cells, which comprise the bulk of the tumor cell population, and tumorigenic stem cells (cancer stem cells).

[0077] As used herein “tumorigenic” refers to the functional features of a solid tumor stem cell including the properties of self-renewal (giving rise to additional tumorigenic cancer stem cells) and proliferation to generate all other tumor cells (giving rise to differentiated and thus non-tumorigenic tumor cells) that allow solid tumor stem cells to form a tumor.

[0078] As used herein, the “tumorigenicity” of a tumor refers to the ability of a random sample of cells from the tumor to form palpable tumors upon serial transplantation into immunocompromised mice.

[0079] As used herein, “lipid nanoparticles” or “LNPs” can deliver nucleic acid (e.g., DNA or RNA), protein (e.g., RNA-guided DNA binding agent), or nucleic acid together with protein. LNPs can comprise biodegradable, ionizable lipids. For example, LNPs can comprise (9Z,12Z)-3-((4,4-bis(octyloxy)butanoyl)oxy)-2-((((3-(diethylamino)propoxy)carbonyl)oxy)methyl)propyl octadeca-9,12-dienoate, also called 3-((4,4-bis(octyloxy)butanoyl)oxy)-2-((((3-(diethylamino)propoxy)carbonyl)oxy)methyl)propyl (9Z,12Z)-octadeca-9,12-dienoate) or another ionizable lipid. In an aspect, the term cationic and ionizable in the context of LNP lipids can be use interchangeably, e.g., wherein ionizable lipids are cationic depending on the pH.

[0080] “Sequence identity” and “sequence similarity” can be determined by alignment of two peptide or two nucleotide sequences using global or local alignment algorithms. Sequences may then be referred to as “substantially identical” or “essentially similar” when they are optimally aligned. For example, sequence similarity or identity can be determined by searching against databases such as FASTA, BLAST, etc., but hits should be retrieved and aligned pairwise to compare sequence identity. Two proteins or two protein domains, or two nucleic acid sequences can have “substantial sequence identity” if the percentage sequence identity is at least 70%, 75%, 80%, 85%, 90%, 95%, 98%, 99% or more, preferably 90%, 95%, 98%, 99% or more. Such sequences are also referred to as “variants” herein, e.g., other variants of a missing, deficient, and/or mutant protein or enzyme. It should be understood that sequence with substantial sequence identity do not necessarily have the same length and may differ in length. For example, sequences that have the same nucleotide sequence but of which one has additional nucleotides on the 3′- and/or 5′-side are 100% identical.

[0081] As used herein, “immune-modulating” refers to the ability of a disclosed isolated nucleic acid molecules, a disclosed vector, a disclosed pharmaceutical formulation, or a disclosed agent to alter (modulate) one or more aspects of the immune system. The immune system functions to protect the organism from infection and from foreign antigens by cellular and humoral mechanisms involving lymphocytes, macrophages, and other antigen-presenting cells that regulate each other by means of multiple cell-cell interactions and by elaborating soluble factors, including lymphokines and antibodies, that have autocrine, paracrine, and endocrine effects on immune cells.

[0082] As used herein, “immune modulator” refers to an agent that is capable of adjusting a given immune response to a desired level (e.g., as in immunopotentiation, immunosuppression, or induction of immunologic tolerance). Examples of immune modulators include but are not limited to, a disclosed immune modulator can comprise aspirin, azathioprine, belimumab, betamethasone dipropionate, betamethasone valerate, bortezomib, bredinin, cyazathioprine, cyclophosphamide, cyclosporine, deoxyspergualin, didemnin B, fluocinolone acetonide, folinic acid, ibuprofen, IL6 inhibitors (such as sarilumab) indomethacin, inebilizumab, intravenous gamma globulin (IVIG), methotrexate, methylprednisolone, mycophenolate mofetil, naproxen, prednisolone, prednisone, prednisolone indomethacin, rapamycin, rituximab, sirolimus, sulindac, synthetic vaccine particles containing rapamycin (SVP-Rapamycin or ImmTOR), thalidomide, tocilizumab, tolmetin, triamcinolone acetonide, anti-CD3 antibodies, anti-CD4 antibodies, anti-CD19 antibodies, anti-CD20 antibodies, anti-CD22 antibodies, anti-CD40 antibodies, anti-FcRN antibodies, anti-IL6 antibodies, anti-IGFIR antibodies, an IL2 mutein, a BTK inhibitor, or a combination thereof. In an aspect, a disclosed immune modulator can comprise one or more Treg (regulatory T cells) infusions (e.g., antigen specific Treg cells to AAV). In an aspect, a disclosed immune modulator can be bortezomib or SVP-Rapamycin. In an aspect, an immune modulator can be administered by any suitable route of administration including, but not limited to, in utero, intra-CSF, intrathecally, intravenously, subcutaneously, transdermally, intradermally, intramuscularly, orally, transcutaneously, intraperitoneally (IP), or intravaginally. In an aspect, a disclosed immune modulator can be administered using a combination of routes. Administration can also include hepatic intra-arterial administration or administration through the hepatic portal vein (HPV). Administration of an immune modulator can be continuous or intermittent, and administration can comprise a combination of one or more routes.

[0083] As used herein, the term “package insert” is used to refer to instructions customarily included in commercial packages of therapeutic products, that contain information about the indications, usage, dosage, administration, contraindications and/or warnings concerning the use of such therapeutic products.

[0084] As used herein, the term “in combination” in the context of the administration of other therapies (e.g., other agents) includes the use of more than one therapy (e.g., drug therapy). Administration “in combination with” one or more further therapeutic agents includes simultaneous (e.g., concurrent) and consecutive administration in any order. The use of the term “in combination” does not restrict the order in which therapies are administered to a subject. By way of non-limiting example, a first therapy (e.g., the disclosed isolated nucleic acid molecules, disclosed vectors, disclosed cells (e.g., disclosed genetically modified cells expressing a chimeric antigen receptor targeting phosphatidylserine (PS) or the disclosed engineered T cells or NK cells or macrophages expressing a chimeric antigen receptor targeting phosphatidylserine (PS)), disclosed pharmaceutical formulations, or a combination thereof) can be administered prior to (e.g., 1 minute, 15 minutes, 30 minutes, 45 minutes, 1 hour, 2 hours, 3 hours, 4 hours, 5 hours, 6 hours, 7 hours, 8 hours, 12 hours, 24 hours, 48 hours, 72 hours, 96 hours, 1 week, 2 weeks, 3 weeks, 4 weeks, 5 weeks, 6 weeks, 8 weeks, 8 weeks, 9 weeks, 10 weeks, 11 weeks, or 12 weeks), concurrently, or after (e.g., 1 minute, 15 minutes, 30 minutes, 45 minutes, 1 hour, 2 hours, 3 hours, 4 hours, 5 hours, 6 hours, 7 hours, 8 hours, 12 hours, 24 hours, 48 hours, 72 hours, 96 hours, 1 week, 2 weeks, 3 weeks, 4 weeks, 5 weeks, 6 weeks, 7 weeks, 8 weeks, 9 weeks, 10 weeks, 11 weeks, or 12 weeks or longer) the administration of a second therapy to a subject having or diagnosed with cancer.

[0085] Disclosed are the components to be used to prepare the disclosed isolated nucleic acid molecules, disclosed vectors, or disclosed pharmaceutical formulations as well as the disclosed isolated nucleic acid molecules, disclosed vectors, or disclosed pharmaceutical formulations used within the methods disclosed herein. These and other materials are disclosed herein, and it is understood that when combinations, subsets, interactions, groups, etc. of these materials are disclosed that while specific reference of each various individual and collective combinations and permutation of these compounds cannot be explicitly disclosed, each is specifically contemplated and described herein. For example, if a particular compound is disclosed and discussed and a number of modifications that can be made to a number of molecules including the compounds are discussed, specifically contemplated is each and every combination and permutation of the compound and the modifications that are possible unless specifically indicated to the contrary. Thus, if a class of molecules A, B, and C are disclosed as well as a class of molecules D, E, and F and an example of a combination molecule, A-D is disclosed, then even if each is not individually recited each is individually and collectively contemplated meaning combinations, A-E, A-F, B-D, B-E, B-F, C-D, C-E, and C-F are considered disclosed. Likewise, any subset or combination of these is also disclosed. Thus, for example, the sub-group of A-E, B-F, and C-E would be considered disclosed. This concept applies to all aspects of this application including, but not limited to, steps in methods of making and using the compositions of the invention. Thus, if there are a variety of additional steps that can be performed it is understood that each of these additional steps can be performed with any specific embodiment or combination of embodiments of the methods of the invention.

### B. Chimeric Antigen Receptors

[0086] “Chimeric antigen receptor” or “CAR” refers to a molecule engineered to comprise a binding domain and a means of activating immune cells (for example T cells such as naive T cells, central memory T cells, effector memory T cells, NK cells or combination thereof) upon antigen binding. CARs are also known as artificial T cell receptors, chimeric T cell receptors or chimeric immunoreceptors. In some embodiments, a CAR comprises a binding domain, an extracellular domain, a transmembrane domain, one or more co-stimulatory domains, and an intracellular signaling domain. A T cell that has been genetically engineered to express a chimeric antigen receptor may be referred to as a CAR T cell. Similarly, an NK cell that has been genetically engineered to express a chimeric antigen receptor may be referred to as a CAR NK cell.

[0087] Chimeric antigen receptors (CARs) are proteins which graft the specificity of a monoclonal antibody (mAb) to the effector function of a T-cell. CARs comprise an extracellular ligand-binding domain, most commonly a single chain variable fragment (scFv), a spacer domain, a transmembrane domain, and one or more cytoplasmic domains.

[0088] First-generation CARs contain a single activatory domain (e.g., the CD3ζ cytoplasmic domain). Second-generation CARs comprise an activatory domain (e.g., CD3ζ or γ chain of Fc receptors) connected to co-stimulatory domains obtained from native co-stimulatory molecules such as CD28 and 4-1BB. Third-generation CARs incorporate CD3ζ with two co-stimulatory cytoplasmic domains. The design of each module of the CAR structure can contribute to CAR-T-cell signaling mechanisms, effector functions, and its eventual efficacy and toxicity. It is evident that modules such as the scFv and intracellular cytoplasmic domains play a key role in ligand recognition and signaling. It has recently become clear that non-signaling domains such as the spacer and transmembrane domains can also influence CAR functions.

[0089] scFvs are the most commonly used ligand-binding domains in CAR structures. scFv affinity is a key parameter that has been modulated to improve specificity of the CAR and reduce “on-target, off-tumor” side effects, which is of particular importance when the target antigen is ubiquitously expressed on healthy tissue.

[0090] Spacer domains that connect the scFv to the transmembrane domain lend flexibility to the scFv and help improve efficacy. Appropriate spacer domain engineering can enable recognition of target epitopes that are otherwise sterically inaccessible. Spacer domain modulation can also be used to regulate synaptic cleft distances and hence signaling phenomena such as kinetic segregation. To maintain optimal synapse distance, membrane-distal epitopes usually require shorter spacers whereas membrane-proximal epitopes require longer spacers. Apart from limiting exclusion of inhibitory phosphatases, increasing epitope-paratope distance can also result in impaired delivery of granzymes and perforins to the target cell, thus reducing lytic efficiency. In a physiological T-cell setting, the highly dense immune synapse hinders diffusion of lytic granules, which enhances pore formation by perforins and granzyme delivery [

[0091] Transmembrane domains in CAR structures serve as a fulcrum for transducing ligand recognition signals to the intracellular cytoplasmic domain.

[0092] In T cells, the intracellular signaling domain of the TCR-CD3 complex transduces the necessary “signal 1” to kick-start the signaling cascade. Co-stimulatory receptors, especially CD28, convey “signal 2” which is important for sustained signaling, prevention of anergy, and proliferation. 4-1BB, ICOS, and OX40 are other co-stimulatory receptors that affect T-cell differentiation pathways, metabolic cycles, as well as apoptosis and activation-induced cell death.

[0093] In CAR-T cells, co-stimulatory signals are usually included in-cis with the CD35 cytoplasmic domain. The number and type of co-stimulatory signals, as well as their order and proximity to the membrane, are critical parameters that have been addressed in literature (FIG. 5). Immunoreceptor Tyrosine Activation Motifs (ITAMs) present on cytoplasmic domains of TCR-CD3 complexes are the phosphorylation sites, which recruit ZAP70, critical for signaling cascades. In T cells, ITAM diversity and number of functional CD32 ITAMs are important for optimal signaling. In CAR-T cells, the number of functional ITAMs is gaining attention as an important design strategy to ensure efficacy.

### C. Annexins

[0094] ANXA1 (Annexin A1) is a protein coding gene. This gene encodes a membrane-localized protein that binds phospholipids. This protein inhibits phospholipase A2 and has anti-inflammatory activity. Loss of function or expression of this gene has been detected in multiple tumors. Diseases associated with ANXA1 include Shoulder Impingement Syndrome and Brain Edema. Among its related pathways are GPCR downstream signaling and Class A/1 (Rhodopsin-like receptors). Gene Ontology (GO) annotations related to this gene include calcium ion binding and signaling receptor binding. An important paralog of this gene is ANXA2. ANXA1 plays important roles in the innate immune response as effector of glucocorticoid-mediated responses and regulator of the inflammatory process. ANXA1 has anti-inflammatory activity. ANXA1 plays a role in glucocorticoid-mediated down-regulation of the early phase of the inflammatory response (by similarity). ANXA1 contributes to the adaptive immune response by enhancing signaling cascades that are triggered by T-cell activation, regulates differentiation and proliferation of activated T-cells. ANXA1 promotes the differentiation of T-cells into Th1 cells and negatively regulates differentiation into Th2 cells. ANXA1 has no effect on unstimulated T cells. ANXA1 negatively regulates hormone exocytosis via activation of the formyl peptide receptors and reorganization of the actin cytoskeleton. ANXA1 has high affinity for Ca (2+) and can bind up to eight Ca (2+) ions (by similarity). ANXA1 displays Ca (2+)-dependent binding to phospholipid membranes. ANXA1 plays a role in the formation of phagocytic cups and phagosomes and plays a role in phagocytosis by mediating the Ca (2+)-dependent interaction between phagosomes and the actin cytoskeleton (by similarity). ANXA1 functions at least in part by activating the formyl peptide receptors and downstream signaling cascades. ANXA1 promotes chemotaxis of granulocytes and monocytes via activation of the formyl peptide receptors and promotes rearrangement of the actin cytoskeleton, cell polarization and cell migration. ANXA1 promotes resolution of inflammation and wound healing. ANXA1 acts via neutrophil N-formyl peptide receptors to enhance the release of CXCL2.

[0095] ANXA2 (Annexin A2) is a protein coding gene. This gene encodes a member of the annexin family. Members of this calcium-dependent phospholipid-binding protein family play a role in the regulation of cellular growth and in signal transduction pathways. This protein functions as an autocrine factor which heightens osteoclast formation and bone resorption. This gene has three pseudogenes located on chromosomes 4, 9 and 10, respectively. Multiple alternatively spliced transcript variants encoding different isoforms have been found for this gene. Annexin A2 expression has been found to correlate with resistance to treatment against various cancer forms. Diseases associated with ANXA2 include Antiphospholipid Syndrome and Acute Promyelocytic Leukemia. Among its related pathways are Interleukin-12 family signaling and Innate Immune System. Gene Ontology (GO) annotations related to this gene include RNA binding and small GTPase binding. An important paralog of this gene is ANXA1. Calcium-regulated membrane-binding protein whose affinity for calcium is greatly enhanced by anionic phospholipids. It binds two calcium ions with high affinity. May be involved in heat-stress response. Inhibits PCSK9-enhanced LDLR degradation, probably reduces PCSK9 protein levels via a translational mechanism but also competes with LDLR for binding with PCSK9. ANXA2 binds M. pneumoniae CARDS toxin, probably serves as one receptor for this pathogen. When ANXA2 is down-regulated by siRNA, less toxin binds to human cells and less vacuolization (a symptom of M. pneumoniae infection) is seen.

[0096] ANXA3 (Annexin A3) is a protein coding gene. This gene encodes a member of the annexin family. Members of this calcium-dependent phospholipid-binding protein family play a role in the regulation of cellular growth and in signal transduction pathways. This protein functions in the inhibition of phospholipase A2 and cleavage of inositol 1,2-cyclic phosphate to form inositol 1-phosphate. This protein may also play a role in anti-coagulation. Diseases associated with ANXA3 include ovarian cancer and prostate cancer. Among its related pathways are prostaglandin synthesis and regulation. Gene Ontology (GO) annotations related to this gene include calcium ion binding and calcium-dependent phospholipid binding. An important paralog of this gene is ANXA11. Inhibitor of phospholipase A2, also possesses anti-coagulant properties. Also cleaves the cyclic bond of inositol 1,2-cyclic phosphate to form inositol 1-phosphate.

[0097] ANXA4 (Annexin A4) is a protein coding gene. Annexin IV (ANX4) belongs to the annexin family of calcium-dependent phospholipid binding proteins. Although their functions are still not clearly defined, several members of the annexin family have been implicated in membrane-related events along exocytotic and endocytotic pathways. ANX4 has 45 to 59% identity with other members of its family and shares a similar size and exon-intron organization. Isolated from human placenta, ANX4 encodes a protein that has possible interactions with ATP and has in vitro anticoagulant activity and also inhibits phospholipase A2 activity. ANX4 is almost exclusively expressed in epithelial cells. Several transcript variants encoding different isoforms have been found for this gene. Among its related pathways are prostaglandin synthesis and regulation. Gene Ontology (GO) annotations related to this gene include calcium ion binding and calcium-dependent protein binding. An important paralog of this gene is ANXA11. Calcium/phospholipid-binding protein which promotes membrane fusion and is involved in exocytosis.

[0098] ANXA5 (Annexin A5) is a protein coding gene. The Annexin 5 gene spans 29 kb containing 13 exons, and encodes a single transcript of approximately 1.6 kb and a protein product with a molecular weight of about 35 kDa. The protein encoded by this gene belongs to the annexin family of calcium-dependent phospholipid binding proteins some of which have been implicated in membrane-related events along exocytotic and endocytotic pathways. Annexin 5 is a phospholipase A2 and protein kinase C inhibitory protein with calcium channel activity and a potential role in cellular signal transduction, inflammation, growth and differentiation. Annexin 5 has also been described as placental anticoagulant protein I, vascular anticoagulant-alpha, endonexin II, lipocortin V, placental protein 4 and anchorin CII. Polymorphisms in this gene have been implicated in various obstetric complications. Diseases associated with ANXA5 include Pregnancy Loss, Recurrent 3 and Antiphospholipid Syndrome. Among its related pathways are Response to elevated platelet cytosolic Ca2+ and Regulation of CFTR activity (norm and CF). Gene Ontology (GO) annotations related to this gene include calcium ion binding and calcium-dependent phospholipid binding. An important paralog of this gene is ANXA4. This protein is an anticoagulant protein that acts as an indirect inhibitor of the thromboplastin-specific complex, which is involved in the blood coagulation cascade.

[0099] ANXA6 (Annexin A6) is a protein coding gene. Annexin VI belongs to a family of calcium-dependent membrane and phospholipid binding proteins. Several members of the annexin family have been implicated in membrane-related events along exocytotic and endocytotic pathways. The annexin VI gene is approximately 60 kbp long and contains 26 exons. It encodes a protein of about 68 kDa that consists of eight 68-amino acid repeats separated by linking sequences of variable lengths. It is highly similar to human annexins I and II sequences, each of which contain four such repeats. Annexin VI has been implicated in mediating the endosome aggregation and vesicle fusion in secreting epithelia during exocytosis. Alternatively spliced transcript variants have been described. Diseases associated with ANXA6 include Kwashiorkor and Malignant Hyperthermia. Among its related pathways are Cardiac conduction and Myometrial relaxation and contraction pathways. Gene Ontology (GO) annotations related to this gene include calcium ion binding and GTP binding. An important paralog of this gene is ANXA11.

[0100] ANXA7 (Annexin A7) is a protein coding gene. Annexin VII is a member of the annexin family of calcium-dependent phospholipid binding proteins. The Annexin VII gene contains 14 exons and spans approximately 34 kb of DNA. An alternatively spliced cassette exon results in two mRNA transcripts of 2.0 and 2.4 kb which are predicted to generate two protein isoforms differing in their N-terminal domain. The alternative splicing event is tissue specific and the mRNA containing the cassette exon is prevalent in brain, heart and skeletal muscle. The transcripts also differ in their 3″-non coding regions by the use of two alternative poly(A) signals. Annexin VII encodes a protein with a molecular weight of approximately 51 kDa with a unique, highly hydrophobic N-terminal domain of 167 amino acids and a conserved C-terminal region of 299 amino acids. The latter domain is composed of alternating hydrophobic and hydrophilic segments. Structural analysis of the protein suggests that Annexin VII is a membrane binding protein with diverse properties, including voltage-sensitive calcium channel activity, ion selectivity and membrane fusion. Among its related pathways are Cytoskeletal Signaling and Ca, CAMP and Lipid Signaling. Gene Ontology (GO) annotations related to this gene include RNA binding and integrin binding. An important paralog of this gene is ANXA11.

[0101] ANXA8 (Annexin A8) is a protein coding gene. This gene encodes a member of the annexin family of evolutionarily conserved Ca2+ and phospholipid binding proteins. The encoded protein may function as an anticoagulant that indirectly inhibits the thromboplastin-specific complex. Overexpression of this gene has been associated with acute myelocytic leukemia. A highly similar duplicated copy of this gene is found in close proximity on the long arm of chromosome 10. Diseases associated with ANXA8 include Breast Adenocarcinoma and Heterophyiasis. Gene Ontology (GO) annotations related to this gene include calcium ion binding and calcium-dependent phospholipid binding. An important paralog of this gene is ANXA8L1. This protein is an anticoagulant protein that acts as an indirect inhibitor of the thromboplastin-specific complex, which is involved in the blood coagulation cascade.

[0102] ANXA8L1 (Annexin A8 Like 1) is a protein coding gene. Among its related pathways are Prostaglandin synthesis and regulation. Gene Ontology (GO) annotations related to this gene include calcium ion binding and calcium-dependent phospholipid binding. An important paralog of this gene is ANXA8. This gene encodes a member of the annexin family of evolutionarily conserved Ca2+ and phospholipid binding proteins. The encoded protein may function as an anticoagulant that indirectly inhibits the thromboplastin-specific complex. Overexpression of this gene has been associated with acute myelocytic leukemia. A highly similar duplicated copy of this gene is found in close proximity on the long arm of chromosome 10.

[0103] ANXA9 (Annexin A9) is a protein coding gene. The annexins are a family of calcium-dependent phospholipid-binding proteins. Members of the annexin family contain 4 internal repeat domains, each of which includes a type II calcium-binding site. The calcium-binding sites are required for annexins to aggregate and cooperatively bind anionic phospholipids and extracellular matrix proteins. This gene encodes a divergent member of the annexin protein family in which all four homologous type II calcium-binding sites in the conserved tetrad core contain amino acid substitutions that ablate their function. However, structural analysis suggests that the conserved putative ion channel formed by the tetrad core is intact. Diseases associated with ANXA9 include Pemphigus and Acantholytic Acanthoma. Gene Ontology (GO) annotations related to this gene include calcium ion binding and phospholipid binding. An important paralog of this gene is ANXA2. Low affinity receptor for acetylcholine known to be targeted by disease-causing pemphigus vulgaris antibodies in keratinocytes.

[0104] ANXA10 (Annexin A10) is a protein coding gene. This gene encodes a member of the annexin family. Members of this calcium-dependent phospholipid-binding protein family play a role in the regulation of cellular growth and in signal transduction pathways. The function of this gene has not yet been determined. Diseases associated with ANXA10 include Hepatocellular Carcinoma. Gene Ontology (GO) annotations related to this gene include calcium ion binding and calcium-dependent phospholipid binding. An important paralog of this gene is ANXA4.

[0105] ANXA11 (Annexin A11) is a protein coding gene. This gene encodes a member of the annexin family, a group of calcium-dependent phospholipid-binding proteins. Annexins have unique N-terminal domains and conserved C-terminal domains, which contain calcium-dependent phospholipid-binding sites. The encoded protein is a 56-kD antigen recognized by sera from patients with various autoimmune diseases. Several transcript variants encoding two different isoforms have been identified. Diseases associated with ANXA11 include Amyotrophic Lateral Sclerosis 23 and Inclusion Body Myopathy 0nd Brain White Matter Abnormalities. Gene Ontology (GO) annotations related to this gene include RNA binding and calcium-dependent protein binding. An important paralog of this gene is ANXA7. Binds specifically to calcyclin in a calcium-dependent manner (By similarity). Required for midbody formation and completion of the terminal phase of cytokinesis.

[0106] ANXA13 (Annexin A13) is a protein coding gene. This gene encodes a member of the annexin family. Members of this calcium-dependent phospholipid-binding protein family play a role in the regulation of cellular growth and in signal transduction pathways. The specific function of this gene has not yet been determined; however, it is associated with the plasma membrane of undifferentiated, proliferating endothelial cells and differentiated villus enterocytes. Alternatively spliced transcript variants encoding different isoforms have been identified. Gene Ontology (GO) annotations related to this gene include calcium ion binding and phosphatidylserine binding. An important paralog of this gene is ANXA8.

### D. Compositions for Use in the Disclosed Methods

### 1. Chimeric Antigen Receptors

[0107] Disclosed herein are chimeric antigen receptors. Disclosed herein are chimeric antigen receptors for phosphatidylserine (PS). Disclosed herein is a chimeric antigen receptor (CAR), comprising an extracellular domain comprising an antigen binding domain, a transmembrane domain, and an intracellular domain comprising one or more immunostimulatory domains.

[0108] In an aspect, a disclosed the extracellular domain can further comprise a signal peptide. In an aspect, a disclosed signal peptide can comprise a CD8 signal peptide.

[0109] In an aspect, a disclosed CD8 signal peptide can comprise the sequence set forth in SEQ ID NO: 08 or a fragment thereof.

[0110] In an aspect, a disclosed CD8 signal peptide can comprise a sequence having at least 70%, at least 75%, at least 80%, at least 85%, at least 90%, or at least 95% identity to the sequence set forth in SEQ ID NO:08 or a fragment thereof.

[0111] In an aspect, a disclosed antigen binding domain can comprise a phosphatidylserine (PS) binding domain. In an aspect, a disclosed PS binding domain can comprise Annexin A1 (ANXA1) or the PS-binding core domain, Annexin A2 (ANXA1), Annexin A3 (ANXA1), Annexin A4 (ANXA1), Annexin A5 (ANXA1), Annexin A6 (ANXA1), Annexin A7 (ANXA1), Annexin A8 (ANXA1), Annexin A8 Like 1 (ANXA1), Annexin A9 (ANXA1), Annexin A10 (ANXA1), Annexin A11 (ANXA1), Annexin A13 (ANXA1), Adhesion G Protein Coupled Receptor B1 (ADGRB1) or the extracellular domain thereof, Apolipoprotein H (APO-H), Coagulation Factor II (F2), Coagulation Factor VII (F7), Coagulation Factor IX (F9), Coagulation Factor X (F10), Growth Arrest Specific 6 (CAS6), Milk Fat Globule EGF And Factor V/VIII Domain Containing (MFGE8), Advanced Glycosylation End-Product Specific Receptor (AGER) or the extracellular domain thereof, Jumonji Domain-Containing Protein 6 (JMJD6); Protein S (PROS1), Hepatitis A Virus Cellular Receptor 1 (HAVCR1) or the extracellular domain thereof, Hepatitis A Virus Cellular Receptor 2 (HAVCR2) or the extracellular domain thereof, T Cell Immunoglobulin and Mucin Domain Containing (TIM-3) or the extracellular domain thereof, Protein Kinase C Alpha (PRKCA) or the C2 domain thereof, Synaptotagmin (SYT1) or the C2A domain thereof, Stabilin-1 (STAB1) or the extracellular domain thereof, Stabilin-2 (STAB2) or the extracellular domain thereof, or any combination thereof.

[0112] In an aspect, a disclosed ANXA1 can comprise the amino acid sequence set forth in SEQ ID NO: 19 or a fragment thereof. In an aspect, a disclosed ANXA1 signal peptide can comprise a sequence having at least 70%, at least 75%, at least 80%, at least 85%, at least 90%, or at least 95% identity to the sequence set forth in SEQ ID NO:19 or a fragment thereof. In an aspect, a disclosed ANXA1 can comprise the amino acid sequence set forth in SEQ ID NO:20 or a fragment thereof. In an aspect, a disclosed ANXA1 signal peptide can comprise a sequence having at least 70%, at least 75%, at least 80%, at least 85%, at least 90%, or at least 95% identity to the sequence set forth in SEQ ID NO:20 or a fragment thereof. In an aspect, a disclosed ANXA2 can comprise the amino acid sequence set forth in SEQ ID NO:21 or a fragment thereof. In an aspect, a disclosed ANXA2 signal peptide can comprise a sequence having at least 70%, at least 75%, at least 80%, at least 85%, at least 90%, or at least 95% identity to the sequence set forth in SEQ ID NO:21 or a fragment thereof. In an aspect, a disclosed ANXA3 can comprise the amino acid sequence set forth in SEQ ID NO:22 or a fragment thereof. In an aspect, a disclosed ANXA3 signal peptide can comprise a sequence having at least 70%, at least 75%, at least 80%, at least 85%, at least 90%, or at least 95% identity to the sequence set forth in SEQ ID NO:22 or a fragment thereof. In an aspect, a disclosed ANXA4 can comprise the amino acid sequence set forth in SEQ ID NO: 23 or a fragment thereof. In an aspect, a disclosed ANXA4 signal peptide can comprise a sequence having at least 70%, at least 75%, at least 80%, at least 85%, at least 90%, or at least 95% identity to the sequence set forth in SEQ ID NO:23 or a fragment thereof. In an aspect, a disclosed ANXA5 can comprise the amino acid sequence set forth in SEQ ID NO:24 or a fragment thereof. In an aspect, a disclosed ANXA5 signal peptide can comprise a sequence having at least 70%, at least 75%, at least 80%, at least 85%, at least 90%, or at least 95% identity to the sequence set forth in SEQ ID NO:24 or a fragment thereof. In an aspect, a disclosed ANXA6 can comprise the amino acid sequence set forth in SEQ ID NO:25 or a fragment thereof. In an aspect, a disclosed ANXA6 signal peptide can comprise a sequence having at least 70%, at least 75%, at least 80%, at least 85%, at least 90%, or at least 95% identity to the sequence set forth in SEQ ID NO:25 or a fragment thereof. In an aspect, a disclosed ANXA7 can comprise the amino acid sequence set forth in SEQ ID NO:26 or a fragment thereof. In an aspect, a disclosed ANXA7 signal peptide can comprise a sequence having at least 70%, at least 75%, at least 80%, at least 85%, at least 90%, or at least 95% identity to the sequence set forth in SEQ ID NO:26 or a fragment thereof. In an aspect, a disclosed ANXA8 can comprise the amino acid sequence set forth in SEQ ID NO: 27 or a fragment thereof. In an aspect, a disclosed ANXA8 signal peptide can comprise a sequence having at least 70%, at least 75%, at least 80%, at least 85%, at least 90%, or at least 95% identity to the sequence set forth in SEQ ID NO:27 or a fragment thereof. In an aspect, a disclosed ANXA8L1 can comprise the amino acid sequence set forth in SEQ ID NO:28 or a fragment thereof. In an aspect, a disclosed ANXA8L1 signal peptide can comprise a sequence having at least 70%, at least 75%, at least 80%, at least 85%, at least 90%, or at least 95% identity to the sequence set forth in SEQ ID NO:28 or a fragment thereof. In an aspect, a disclosed ANXA9 can comprise the amino acid sequence set forth in SEQ ID NO:29 or a fragment thereof. In an aspect, a disclosed ANXA9 signal peptide can comprise a sequence having at least 70%, at least 75%, at least 80%, at least 85%, at least 90%, or at least 95% identity to the sequence set forth in SEQ ID NO:29 or a fragment thereof. In an aspect, a disclosed ANXA10 can comprise the amino acid sequence set forth in SEQ ID NO:30 or a fragment thereof. In an aspect, a disclosed ANXA10 signal peptide can comprise a sequence having at least 70%, at least 75%, at least 80%, at least 85%, at least 90%, or at least 95% identity to the sequence set forth in SEQ ID NO:30 or a fragment thereof. In an aspect, a disclosed ANXA11 can comprise the amino acid sequence set forth in SEQ ID NO:31 or a fragment thereof. In an aspect, a disclosed ANXA11 signal peptide can comprise a sequence having at least 70%, at least 75%, at least 80%, at least 85%, at least 90%, or at least 95% identity to the sequence set forth in SEQ ID NO:31 or a fragment thereof. In an aspect, a disclosed ANXA13 can comprise the amino acid sequence set forth in SEQ ID NO:32 or a fragment thereof. In an aspect, a disclosed ANXA13 signal peptide can comprise a sequence having at least 70%, at least 75%, at least 80%, at least 85%, at least 90%, or at least 95% identity to the sequence set forth in SEQ ID NO:32 or a fragment thereof.

[0113] In an aspect, a disclosed ADGRB1 can comprise the amino acid sequence set forth in SEQ ID NO: 33 or a fragment thereof. In an aspect, a disclosed ADGRB1 signal peptide can comprise a sequence having at least 70%, at least 75%, at least 80%, at least 85%, at least 90%, or at least 95% identity to the sequence set forth in SEQ ID NO:33 or a fragment thereof. In an aspect, a disclosed ADGRB1 can comprise the amino acid sequence set forth in SEQ ID NO:34 or a fragment thereof. In an aspect, a disclosed ADGRB1 signal peptide can comprise a sequence having at least 70%, at least 75%, at least 80%, at least 85%, at least 90%, or at least 95% identity to the sequence set forth in SEQ ID NO:34 or a fragment thereof. In an aspect, a disclosed APO-H can comprise the amino acid sequence set forth in SEQ ID NO:35 or a fragment thereof. In an aspect, a disclosed APO-H can comprise a sequence having at least 70%, at least 75%, at least 80%, at least 85%, at least 90%, or at least 95% identity to the sequence set forth in SEQ ID NO:35 or a fragment thereof. In an aspect, a disclosed F2 can comprise the amino acid sequence set forth in SEQ ID NO:36 or a fragment thereof. In an aspect, a disclosed F2 can comprise a sequence having at least 70%, at least 75%, at least 80%, at least 85%, at least 90%, or at least 95% identity to the sequence set forth in SEQ ID NO:36 or a fragment thereof. In an aspect, a disclosed F7 can comprise the amino acid sequence set forth in SEQ ID NO:37 or a fragment thereof. In an aspect, a disclosed F7 can comprise a sequence having at least 70%, at least 75%, at least 80%, at least 85%, at least 90%, or at least 95% identity to the sequence set forth in SEQ ID NO:37 or a fragment thereof. In an aspect, a disclosed F9 can comprise the amino acid sequence set forth in SEQ ID NO: 38 or a fragment thereof. In an aspect, a disclosed F9 can comprise a sequence having at least 70%, at least 75%, at least 80%, at least 85%, at least 90%, or at least 95% identity to the sequence set forth in SEQ ID NO:38 or a fragment thereof. In an aspect, a disclosed F10 can comprise the amino acid sequence set forth in SEQ ID NO:39 or a fragment thereof. In an aspect, a disclosed F10 can comprise a sequence having at least 70%, at least 75%, at least 80%, at least 85%, at least 90%, or at least 95% identity to the sequence set forth in SEQ ID NO:39 or a fragment thereof. In an aspect, a disclosed GAS6 can comprise the amino acid sequence set forth in SEQ ID NO:40 or a fragment thereof. In an aspect, a disclosed GAS6 an comprise a sequence having at least 70%, at least 75%, at least 80%, at least 85%, at least 90%, or at least 95% identity to the sequence set forth in SEQ ID NO:40 or a fragment thereof. In an aspect, a disclosed MFGE8 can comprise the amino acid sequence set forth in SEQ ID NO:41 or a fragment thereof. In an aspect, a disclosed MFGE8 can comprise a sequence having at least 70%, at least 75%, at least 80%, at least 85%, at least 90%, or at least 95% identity to the sequence set forth in SEQ ID NO:41 or a fragment thereof. In an aspect, a disclosed AGER can comprise the amino acid sequence set forth in SEQ ID NO: 42 or a fragment thereof. In an aspect, a disclosed AGER can comprise a sequence having at least 70%, at least 75%, at least 80%, at least 85%, at least 90%, or at least 95% identity to the sequence set forth in SEQ ID NO:42 or a fragment thereof. In an aspect, a disclosed AGER can comprise the amino acid sequence set forth in SEQ ID NO:43 or a fragment thereof. In an aspect, a disclosed AGER can comprise a sequence having at least 70%, at least 75%, at least 80%, at least 85%, at least 90%, or at least 95% identity to the sequence set forth in SEQ ID NO:43 or a fragment thereof. In an aspect, a disclosed PROS1 can comprise the amino acid sequence set forth in SEQ ID NO:44 or a fragment thereof. In an aspect, a disclosed PROS1 can comprise a sequence having at least 70%, at least 75%, at least 80%, at least 85%, at least 90%, or at least 95% identity to the sequence set forth in SEQ ID NO:44 or a fragment thereof. In an aspect, a disclosed STAB1 can comprise the amino acid sequence set forth in SEQ ID NO:45 or a fragment thereof. In an aspect, a disclosed STAB1 can comprise a sequence having at least 70%, at least 75%, at least 80%, at least 85%, at least 90%, or at least 95% identity to the sequence set forth in SEQ ID NO:45 or a fragment thereof. In an aspect, a disclosed STAB1 can comprise the amino acid sequence set forth in SEQ ID NO:46 or a fragment thereof. In an aspect, a disclosed STAB1 can comprise a sequence having at least 70%, at least 75%, at least 80%, at least 85%, at least 90%, or at least 95% identity to the sequence set forth in SEQ ID NO:46 or a fragment thereof. In an aspect, a disclosed STAB2 can comprise the amino acid sequence set forth in SEQ ID NO:47 or a fragment thereof. In an aspect, a disclosed STAB2 can comprise a sequence having at least 70%, at least 75%, at least 80%, at least 85%, at least 90%, or at least 95% identity to the sequence set forth in SEQ ID NO:47 or a fragment thereof. In an aspect, a disclosed STAB2 can comprise the amino acid sequence set forth in SEQ ID NO:48 or a fragment thereof. In an aspect, a disclosed STAB2 can comprise a sequence having at least 70%, at least 75%, at least 80%, at least 85%, at least 90%, or at least 95% identity to the sequence set forth in SEQ ID NO:48 or a fragment thereof.

[0114] In an aspect, a disclosed HAVCR1 can comprise the amino acid sequence set forth in SEQ ID NO: 49 or a fragment thereof. In an aspect, a disclosed HAVCR1 can comprise a sequence having at least 70%, at least 75%, at least 80%, at least 85%, at least 90%, or at least 95% identity to the sequence set forth in SEQ ID NO:49 or a fragment thereof. In an aspect, a disclosed HAVCR1 can comprise the amino acid sequence set forth in SEQ ID NO:50 or a fragment thereof. In an aspect, a disclosed HAVCR1 can comprise a sequence having at least 70%, at least 75%, at least 80%, at least 85%, at least 90%, or at least 95% identity to the sequence set forth in SEQ ID NO: 50 or a fragment thereof. In an aspect, a disclosed HAVCR2 can comprise the amino acid sequence set forth in SEQ ID NO:51 or a fragment thereof. In an aspect, a disclosed HAVCR2 can comprise a sequence having at least 70%, at least 75%, at least 80%, at least 85%, at least 90%, or at least 95% identity to the sequence set forth in SEQ ID NO:51 or a fragment thereof. In an aspect, a disclosed HAVCR2 can comprise the amino acid sequence set forth in SEQ ID NO: 52 or a fragment thereof. In an aspect, a disclosed HAVCR2 can comprise a sequence having at least 70%, at least 75%, at least 80%, at least 85%, at least 90%, or at least 95% identity to the sequence set forth in SEQ ID NO:52 or a fragment thereof. In an aspect, a disclosed TIMD4 can comprise the amino acid sequence set forth in SEQ ID NO:53 or a fragment thereof. In an aspect, a disclosed TIMD4 can comprise a sequence having at least 70%, at least 75%, at least 80%, at least 85%, at least 90%, or at least 95% identity to the sequence set forth in SEQ ID NO:53 or a fragment thereof. In an aspect, a disclosed TIMD4 can comprise the amino acid sequence set forth in SEQ ID NO:54 or a fragment thereof. In an aspect, a disclosed TIMD4 can comprise a sequence having at least 70%, at least 75%, at least 80%, at least 85%, at least 90%, or at least 95% identity to the sequence set forth in SEQ ID NO:54 or a fragment thereof. In an aspect, a disclosed PRKCA can comprise the amino acid sequence set forth in SEQ ID NO:55 or a fragment thereof. In an aspect, a disclosed PRKCA can comprise a sequence having at least 70%, at least 75%, at least 80%, at least 85%, at least 90%, or at least 95% identity to the sequence set forth in SEQ ID NO:55 or a fragment thereof. In an aspect, a disclosed PRKCA can comprise the amino acid sequence set forth in SEQ ID NO:56 or a fragment thereof. In an aspect, a disclosed PRKCA can comprise a sequence having at least 70%, at least 75%, at least 80%, at least 85%, at least 90%, or at least 95% identity to the sequence set forth in SEQ ID NO:56 or a fragment thereof. In an aspect, a disclosed SYT1 can comprise the amino acid sequence set forth in SEQ ID NO:57 or a fragment thereof. In an aspect, a disclosed SYT1 can comprise a sequence having at least 70%, at least 75%, at least 80%, at least 85%, at least 90%, or at least 95% identity to the sequence set forth in SEQ ID NO:57 or a fragment thereof. In an aspect, a disclosed SYT1 can comprise the amino acid sequence set forth in SEQ ID NO:58 or a fragment thereof. In an aspect, a disclosed SYT1 can comprise a sequence having at least 70%, at least 75%, at least 80%, at least 85%, at least 90%, or at least 95% identity to the sequence set forth in SEQ ID NO:58 or a fragment thereof. In an aspect, a disclosed JMJD6 can comprise the amino acid sequence set forth in SEQ ID NO: 59 or a fragment thereof. In an aspect, a disclosed JMJD6 can comprise a sequence having at least 70%, at least 75%, at least 80%, at least 85%, at least 90%, or at least 95% identity to the sequence set forth in SEQ ID NO:59 or a fragment thereof.

| Binding | |
|---|---|
| Domain | Identifying Information |
| ANXA1 | HGNC: 533/NCBI Entrez Gene: 301/Ensembl: ENSG00000135046/ |
| | OMIM: 151690/UniProtKB/Swiss-Prot: P04083 |
| ANXA2 | HGNC: 537/NCBI Entrez Gene: 302/Ensembl: ENSG00000182718/ |
| | OMIM: 151740/UniProtKB/Swiss-Prot: P07355) |
| ANXA3 | HGNC: 541/NCBI Entrez Gene: 306/Ensembl: ENSG00000138772/ |
| | OMIM: 106490/UniProtKB/Swiss-Prot: P12429 |
| ANXA4 | HGNC: 542/NCBI Entrez Gene: 307/Ensembl: ENSG00000196975/ |
| | OMIM: 106491/UniProtKB/Swiss-Prot: P09525 |
| ANXA5 | HGNC: 543/NCBI Entrez Gene: 308/Ensembl: ENSG00000164111/ |
| | OMIM: 131230/UniProtKB/Swiss-Prot: P08758 |
| ANXA6 | HGNC: 544/NCBI Entrez Gene: 309/Ensembl: ENSG00000197043/ |
| | OMIM: 114070/UniProtKB/Swiss-Prot: P08133 |
| ANXA7 | HGNC: 545/NCBI Entrez Gene: 310/Ensembl: ENSG00000138279/ |
| | OMIM: 186360/UniProtKB/Swiss-Prot: P20073 |
| ANXA8 | HGNC: 546/NCBI Entrez Gene: 653145/Ensembl: ENSG00000265190/ |
| | OMIM: 602396/UniProtKB/Swiss-Prot: P13928 |
| ANX8L1 | HGNC: 23334/NCBI Entrez Gene: 728113/Ensembl: ENSG00000264230/ |
| | UniProtKB/Swiss-Prot: Q5VT79 |
| ANXA9 | HGNC: 547/NCBI Entrez Gene: 8416/Ensembl: ENSG00000143412/ |
| | OMIM: 603319/UniProtKB/Swiss-Prot: 076027 |
| ANXA10 | HGNC: 534/NCBI Entrez Gene: 11199/Ensembl: ENSG00000109511/ |
| | OMIM: 608008/UniProtKB/Swiss-Prot: Q9UJ72 |
| ANXA11 | HGNC: 535/NCBI Entrez Gene: 311/Ensembl: ENSG00000122359/ |
| | OMIM: 602572/UniProtKB/Swiss-Prot: P50995 |
| ANXA13 | HGNC: 536/NCBI Entrez Gene: 312/Ensembl: ENSG00000104537/ |
| | OMIM: 602573/UniProtKB/Swiss-rot: P27216 |
| F2 | HGNC: 3535/NCBI Entrez Gene: 2147/Ensembl: ENSG00000180210/ |
| | OMIM: 176930/UniProtKB/Swiss-Prot: P00734) |
| F7 | (HGNC: 3544/NCBI Entrez Gene: 2155/Ensembl: ENSG00000057593/ |
| | OMIM: 613878/UniProtKB/Swiss-Prot: P08709) |
| F9 | (HGNC: 3551/NCBI Entrez Gene: 2158/Ensembl: ENSG00000101981/ |
| | OMIM: 300746/UniProtKB/Swiss-Prot: P00740) |
| F10 | (HGNC: 3528/NCBI Entrez Gene: 2159/Ensembl: ENSG00000126218/ |
| | OMIM: 613872/UniProtKB/Swiss-Prot: P00742) |
| AGER/ | (HGNC: 320 NCBI/Entrez Gene: 177/Ensembl: ENSG00000204305/ |
| RAGE | OMIM: 600214/UniProtKB/Swiss-Prot: Q15109 |
| GAS6 | HGNC: 4168 NCBI/Entrez Gene: 2621/Ensembl: ENSG00000183087/ |
| | OMIM: 600441/UniProtKB/Swiss-Prot: Q14393 |
| MFGE8 | HGNC: 7036 NCBI Entrez Gene: 4240/Ensembl: ENSG00000140545/ |
| | OMIM: 602281/UniProtKB/Swiss-Prot: Q08431 |
| AGCR/ | HGNC: 943/NCBI Entrez Gene: 575/Ensembl: ENSG00000181790/ |
| BAI1 | OMIM: 602682/UniProtKB/Swiss-Prot: O14514) |
| PROS | HGNC: 9456 NCBI Entrez Gene: 5627 Ensembl: ENSG00000184500 |
| | OMIM: 176880/UniProtKB/Swiss-Prot: P07225 |
| HAVCR1 | HGNC: 17866/NCBI Entrez Gene: 26762/Ensembl: ENSG00000113249/ |
| | OMIM: 606518/UniProtKB/Swiss-Prot: Q96D42 |
| HAVCR1 | HGNC: 18437/NCBI Entrez Gene: 84868 Ensembl: ENSG00000135077/ |
| | OMIM: 606652/UniProtKB/Swiss-Prot: Q8TDQ0 |
| TIMD4 | HGNC: 25132/NCBI Entrez Gene: 91937 Ensembl: ENSG00000145850/ |
| | OMIM: 610096/UniProtKB/Swiss-Prot: Q96H15 |
| PKCα | HGNC: 9393/NCBI Entrez Gene: 5578 Ensembl: ENSG00000154229/ |
| | OMIM: 176960/UniProtKB/Swiss-Prot: P17252 |
| SYT1 | HGNC: 11509/NCBI Entrez Gene: 6857 Ensembl: ENSG00000067715/ |
| | OMIM: 185605 UniProtKB/Swiss-Prot: P21579 |
| JMJD6 | HGNC: 19355/NCBI Entrez Gene: 23210 Ensembl: ENSG00000070495 |
| | OMIM: 604914 UniProtKB/Swiss-Prot: Q6NYC1 |
| APO-H | HGNC: 616/NCBI Entrez Gene: 350/Ensembl: ENSG00000091583/ |
| | OMIM: 138700/UniProtKB/Swiss-Prot: P02749 |
| STAB1 | HGNC: 18628/NCBI Entrez Gene: 23166/Ensembl: ENSG00000010327/ |
| | OMIM: 608560/UniProtKB/Swiss-Prot: Q9NY15 |
| STAB2 | HGNC: 18629/NCBI Entrez Gene: 55576/Ensembl: ENSG00000136011/ |
| | OMIM: 608561/UniProtKB/Swiss-Prot: Q8WWQ8 |

[0115] In an aspect, a disclosed PS binding domain can comprise the single-chain variable domain of bavituximab. In an aspect, a disclosed PS binding domain can comprise the sequence set forth in SEQ ID NO:73 or a fragment thereof. In an aspect, a disclosed PS binding chain can comprise a sequence having at least 70%, at least 75%, at least 80%, at least 85%, at least 90%, or at least 95% identity to the sequence set forth in SEQ ID NO:73 or a fragment thereof. In an aspect, a disclosed PS binding domain can comprise the single-chain variable domain of PGN632. In an aspect, a single-chain variable domain of PGN632 can comprise a γ1 heavy chain and a λ light chain. In an aspect, a single-chain variable domain of PGN632 can bind to cardiolipin/PS. In an aspect, a disclosed PS binding domain can comprise the single-chain variable domain of P1. In an aspect, a single-chain variable domain of P1 can comprise a γ1 heavy chain and a λ light chain. In an aspect, a single-chain variable domain of P1 can bind to cardiolipin/PS. In an aspect, a disclosed PS binding domain can comprise the single-chain variable domain of IS4. In an aspect, a single-chain variable domain of IS4 can comprise a 13 VH1 heavy chain and a λ Vλ2 light chain. In an aspect, a single-chain variable domain of IS4 can bind to cardiolipin/PS. In an aspect, a disclosed PS binding domain can comprise the single-chain variable domain of CL1. In an aspect, a single-chain variable domain of CLL can comprise a γ3 VH1 heavy chain and a λ Vλ3 light chain. In an aspect, a single-chain variable domain of IS4 can bind to cardiolipin/PS. In an aspect, PGN632, P1, IS4, and CLL are described in Moody et al. (2010) J. Exp. Med. 207 (4): 763-776, which is incorporated herein by reference for its teachings of these antibodies and their characteristics.

[0116] In an aspect, a disclosed antigen binding domain can be a scFV and wherein the scFV can comprise a linker. In an aspect, a disclosed linker can join the V_{H} and V_{L} regions of the ScFv.

[0117] In an aspect, a disclosed chimeric antigen receptor can further comprise a spacer domain between the extracellular domain and the transmembrane domain. In an aspect, a disclosed spacer domain can comprise an immunoglobulin hinge region, an extracellular region of a type 1 membrane proteins, a part or all of an immunoglobulin constant region, or any combination thereof.

[0118] In an aspect, a disclosed spacer domain can comprise a hinge region. In an aspect, a disclosed hinge region can comprise a hinge region of CD8a, CD28, IgG1, IgG2, IgG3, IgG4, IgA, IgD, or any combination thereof. In an aspect, a disclosed CD8a hinge domain can comprise the sequence set forth in SEQ ID NO:09 or a fragment thereof. In an aspect, a disclosed hinge region can be from or can be derived from CD2, CD3 delta, CD3 epsilon, CD3 gamma, CD4, CD7, CD8a, CD813, CD11a (ITGAL), CD11b (ITGAM), CD11c (ITGAX), CD11d (ITGAD), CD18 (ITGB2), CD19 (B4), CD27 (TNFRSF7), CD28, CD28T, CD29 (ITGB1), CD30 (TNFRSF8), CD40 (TNFRSF5), CD48 (SLAMF2), CD49a (ITGA1), CD49d (ITGA4), CD49f (ITGA6), CD66a (CEACAM1), CD66b (CEACAM8), CD66c (CEACAM6), CD66d (CEACAM3), CD66e (CEACAM5), CD69 (CLEC2), CD79A (B-cell antigen receptor complex-associated alpha chain), CD79B (B-cell antigen receptor complex-associated beta chain), CD84 (SLAMF5), CD96 (Tactile), CD100 (SEMA4D), CD103 (ITGAE), CD134 (OX40), CD137 (4-1BB), CD150 (SLAMF1), CD158A (KIR2DL1), CD158B1 (KIR2DL2), CD158B2 (KIR2DL3), CD158C (KIR3DP1), CD158D (KIRDL4), CD158F1 (KIR2DL5A), CD158F2 (KIR2DL5B), CD158K (KIR3DL2), CD160 (BY55), CD162 (SELPLG), CD226 (DNAMI), CD229 (SLAMF3), CD244 (SLAMF4), CD247 (CD3-zeta), CD258 (LIGHT), CD268 (BAFFR), CD270 (TNFSF14), CD272 (BTLA), CD276 (B7-H3), CD279 (PD-1), CD314 (NKG2D), CD319 (SLAMF7), CD335 (NK-p46), CD336 (NK-p44), CD337 (NK-p30), CD352 (SLAMF6), CD353 (SLAMF8), CD355 (CRTAM), CD357 (TNFRSF18), inducible T cell co-stimulator (ICOS), LFA-1 (CD11a/CD18), NKG2C, DAP-10, ICAM-1, NKp80 (KLRF1), IL-2R beta, IL-2R gamma, IL-7R alpha, LFA1-1, SLAMF9, LAT, GADS (GrpL), SLP-76 (LCP2), PAG1/CBP, a CD83 ligand, Fc gamma receptor, MHC class 1 molecule, MHC class 2 molecule, a TNF receptor protein, an immunoglobulin protein, a cytokine receptor, an integrin, activating NK cell receptors, Toll ligand receptor, or any combination thereof, or any fragment/truncation thereof, or any combination of fragments/truncations thereof.

[0119] In an aspect, a disclosed chimeric antigen receptor can further comprise a transmembrane domain. In an aspect, a disclosed transmembrane can further comprise a transmembrane domain of CD2, CD3γ, CD3ε, CD3δ, CD3ξ, CD4, CD8, CD25, CD27, CD28, CD40, CD79A, CD79B, CD79B, CD80, CD86, CD95 (FAS), CD134 (OX40), CD137 (4-1BB), CD154, CD278 (ICOS), TCRα, TCRβ, NKG2D, 2B4, or any combination thereof.

[0120] In an aspect, a disclosed CD28 transmembrane domain can comprise the sequence set forth in SEQ ID NO:12 or a fragment thereof. In an aspect, a disclosed transmembrane domain can comprise a CD28 transmembrane domain or a truncated CD28 domain.

[0121] In an aspect, a disclosed transmembrane domain can be from or can be derived from the alpha, beta or zeta chain of a T-cell receptor, 2B4, CD28, CD3 epsilon, CD3 delta, CD3 gamma, CD45, CD4, CD5, CD7, CD8, CD8 alpha, CD8beta, CD9, CD11a, CD11b, CD11c, CD11d, CD16, CD22, CD27, CD33, CD37, CD64, CD80, CD86, CD134, CD137, TNFSFR25, CD154, 4-1BB/CD137, activating NK cell receptors, an Immunoglobulin protein, B7-H3, BAFFR, BLAME (SLAMF8), BTLA, CD100 (SEMA4D), CD103, CD160 (BY55), CD18, CD19, CD19a, CD2, CD247, CD276 (B7-H3), CD29, CD30, CD40, CD49a, CD49D, CD49f, CD69, CD84, CD96 (Tactile), CDS, CEACAM1, CRT AM, cytokine receptor, DAP-10, DAP-12, DNAMI (CD226), Fc gamma receptor, GADS, GITR, HVEM (LIGHTR), IA4, ICAM-1, ICAM-1, Ig alpha (CD79a), IL-2R beta, IL-2R gamma, IL-7R alpha, inducible T cell costimulator (ICOS), integrins, ITGA4, ITGA4, ITGA6, ITGAD, ITGAE, ITGAL, ITGAM, ITGAX, ITGB2, ITGB7, ITGB1, KIRDS2, LAT, LFA-1, LFA-1, a ligand that binds with CD83, LIGHT, LIGHT, LTBR, Ly9 (CD229), lymphocyte function-associated antigen-1 (LFA-1; CD1-1a/CD18), MHC class 1 molecule, NKG2C, NKG2D, NKp30, NKp44, NKp46, NKp80 (KLRF1), OX-40, PAG/Cbp, programmed death-1 (PD-1), PSGL1, SELPLG (CD162), Signaling Lymphocytic Activation Molecules (SLAM proteins), SLAM (SLAMF1; CD150; IPO-3), SLAMF4 (CD244; 2B4), SLAMF6 (NTB-A; Ly108), SLAMF7, SLP-76, TNF receptor proteins, TNFR2, TNFSF14, a Toll ligand receptor, TRANCE/RANKL, VLA1, or VLA-6, or a combination thereof, or a fragment/truncation thereof, or a combination of fragments and/or truncations thereof.

[0122] In an aspect, a disclosed intracellular domain can comprise the intracellular domain of CD28. In an aspect, a disclosed intracellular domain of CD28 can comprise the sequence set froth in SEQ ID NO:11 or a fragment thereof.

[0123] In an aspect, a disclosed intracellular domain can comprise one or more immunoreceptor tyrosine-based activation domains (ITAMs). In an aspect, a disclosed ITAM can comprise the signaling domain of DAP10, DAP12, TCRζ, FcRγ, FcRβ, CD3γ, CD3ξ, CD3ε, CD3δ, CD3ξ, CD5, CD22, CD66d, CD79a, CD79b, CD278 (ICOS), or any combination thereof.

[0124] In an aspect, a disclosed intracellular domain can further comprise one or more co-stimulatory domains. In an aspect, a disclosed co-stimulatory domain can comprise the signaling domain of CD27, CD28, 4-1BB, OX40, CD30, CD40, PD-1, ICOS (CD278), LFA-1, CD2, CD7 LIGHT, NKG2C, B7-H3, or any combination thereof. In an aspect, a disclosed costimulatory molecule can comprise 4-1BB/CD137, B7-H3, BAFFR, BLAME (SLAMF8), BTLA, CD 33, CD 45, CD100 (SEMA4D), CD103, CD134, CD137, CD154, CD16, CD160 (BY55), CD18, CD19, CD19a, CD2, CD22, CD247, CD27, CD276 (B7-H3), CD28, CD29, CD3 (alpha, beta, delta, epsilon, gamma, zeta), CD30, CD37, CD4, CD4, CD40, CD49a, CD49D, CD49f, CD5, CD64, CD69, CD7, CD80, CD83 ligand, CD84, CD86, CD8alpha, CD8beta, CD9, CD96 (Tactile), CD1-1a, CD1-1b, CD1-1c, CD1-1d, CDS, CEACAM1, CRT AM, DAP-10, DNAMI (CD226), Fc gamma receptor, GADS, GITR, HVEM (LIGHTR), IA4, ICAM-1, ICAM-1, ICOS, Ig alpha (CD79a), IL2R beta, IL2R gamma, IL7R alpha, integrin, ITGA4, ITGA4, ITGA6, ITGAD, ITGAE, ITGAL, ITGAM, ITGAX, ITGB2, ITGB7, ITGB1, KIRDS2, LAT, LFA-1, LFA-1, LIGHT, LIGHT (tumor necrosis factor superfamily member 14; TNFSF14), LTBR, Ly9 (CD229), lymphocyte function-associated antigen-1 (LFA-1 (CD11a/CD18), MHC class I molecule, NKG2C, NKG2D, NKp30, NKp44, NKp46, NKp80 (KLRF1), OX40, PAG/Cbp, PD-1, PSGL1, SELPLG (CD162), signaling lymphocytic activation molecule, SLAM (SLAMF1; CD150; IPO-3), SLAMF4 (CD244; 2B4), SLAMF6 (NTB-A; Ly108), SLAMF7, SLP-76, TNF, TNFr, TNFR2, Toll ligand receptor, TRANCE/RANKL, VLA1, or VLA-6, or fragments, truncations, or combinations thereof.

[0125] In an aspect of a disclosed chimeric antigen receptor, a disclosed intracellular domain can comprise an ITAM and one or more co-stimulatory domains, wherein the ITAM can comprise the signaling domain of CD3γ, CD3ξ, CD3ε, CD3δ, CD3ξ, CD5, CD22, CD79a, CD278 (ICOS), or any combination thereof, and wherein the co-stimulatory domains can comprises the signaling domain of CD27, CD28, 4-1BB, OX40, CD30, CD40, PD-1, ICOS, LFA-1, CD2, CD7 LIGHT, NKG2C, B7-H3, or any combination thereof.

[0126] In an aspect of a disclosed chimeric antigen receptor, a disclosed intracellular domain can comprise one or more ITAMs and one or more co-stimulatory domains, wherein the ITAMs can comprise the signaling domain of CD3γ, CD3ξ, CD3ε, CD3δ, CD3ξ, CD5, CD22, CD79a, CD278 (ICOS), or any combination thereof, and wherein the co-stimulatory domains can comprise the signaling domain of CD27, CD28, 4-1BB, OX40, CD30, CD40, PD-1, ICOS, LFA-1, CD2, CD7 LIGHT, NKG2C, B7-H3, or any combination thereof.

[0127] In an aspect, the disclosed two co-stimulatory domains can comprise two of the same signaling domain. In an aspect, the disclosed two co-stimulatory domains can comprise two different signaling domains. In an aspect, a disclosed 4-1BB signaling domain can comprise the sequence set forth in SEQ ID NO:13 or a fragment thereof. In an aspect, a disclosed CD3g signaling domain comprises the sequence set forth in SEQ ID NO:14 or a fragment thereof.

[0128] In an aspect, a disclosed co-stimulatory domain can comprise CD28. In an aspect, a disclosed CD28 co-stimulatory domain can demonstrate one or more functional aspects: (i) lower persistence and differentiation towards effector memory phenotype compared to 41BB second-generation CARS, (ii) more prone to tonic signaling and causes early exhaustion, (iii) imparts resistance to Tregs in-vitro, in-vivo models however suggested that CD28 co-stimulation causes increased infiltration of Tregs and were less effective against tumors in presence of Tregs, (iv) resistant to CTLA4 inhibition, (v) faster and higher signaling intensity, (vi) does not alter scFv “affinity ceiling”-affinity beyond which IFNγ, IL2 secretion and cytotoxicity do not increase, or (vii) any combination thereof.

[0129] In an aspect, a disclosed co-stimulatory domain can comprise 4-1BB. In an aspect, a disclosed 4-1BB co-stimulatory domain can demonstrate one or more functional aspects: (i) greater persistence and differentiation towards central memory phenotype compared to CD28 second-generation CARs, (ii) can reduce tonic signaling at optimal expression levels and decrease exhaustion, (iii) slower and less intense signaling, or (iv) any combination thereof.

[0130] In an aspect of a chimeric antigen receptor, a disclosed intracellular domain can further comprise a self-cleaving peptide. In an aspect, a disclosed self-cleaving peptide can comprise a T2A, a P2A, a E2A, or F2A peptide. In an aspect, a GSG linker can be added to the N-terminus of a disclosed 2A peptide. In an aspect, a disclosed P2A peptide can comprise the sequence set forth in SEQ ID NO:15 or SEQ ID NO: 102 or a fragment thereof. In an aspect, a disclosed T2A peptide can comprise the sequence set forth in SEQ ID NO: 103 or SEQ ID NO: 104 or a fragment thereof. In an aspect, a disclosed E2A peptide can comprise the sequence set forth in SEQ ID NO: 105 or SEQ ID NO:106 or a fragment thereof. In an aspect, a disclosed F2A peptide can comprise the sequence set forth in SEQ ID NO:107 or SEQ ID NO:108 or a fragment thereof.

[0131] In an aspect of a chimeric antigen receptor, a disclosed intracellular domain can further comprise a sequence encoding an EGFR domain or a truncated EGFR domain. In an aspect, a disclosed EGFR domain can comprise the sequence set forth in SEQ ID NO:17 or a fragment thereof. In an aspect, a disclosed truncated EGFR domain can comprise the sequence set forth in SEQ ID NO: 18 or a fragment thereof.

[0132] In an aspect of a chimeric antigen receptor, a disclosed intracellular domain can further comprise a sequence encoding a self-cleaving peptide, a signal peptide, and an EGFR domain or truncated EGFR domain, or any combination thereof. In an aspect, a disclosed intracellular domain comprising a disclosed self-cleaving peptide, the signal peptide, and the truncated EGFR domain can comprise the sequence set forth in SEQ ID NO:04 or a fragment thereof. In an aspect, a disclosed intracellular domain comprising a disclosed self-cleaving peptide, the signal peptide, and the truncated EGFR domain can comprise a sequence having at least 70%, at least 75%, at least 80%, at least 85%, at least 90%, or at least 95% identity to the sequence set forth in SEQ ID NO: 04.

[0133] In an aspect, a disclosed CAR can comprise a first-generation CAR, a second-generation CAR, a third-generation CAR, a fourth-generation CAR, or a fifth-generation CAR.

[0134] In an aspect, a disclosed CAR can comprise an amino acid sequence having the sequence set forth in SEQ ID NO:01, SEQ ID NO:05, or fragment thereof. In an aspect, a disclosed CAR can comprise an amino acid sequence having the sequence set forth in SEQ ID NO:02, SEQ ID NO: 06, or fragment thereof. In an aspect, a disclosed CAR can comprise an amino acid sequence having the sequence set forth in SEQ ID NO:03, SEQ ID NO:07, or fragment thereof. In an aspect, a disclosed CAR can comprise an amino acid sequence having at least 70%, at least 75%, at least 80%, at least 85%, at least 90%, or at least 95% identity to the sequence set forth in SEQ ID NO: 01, SEQ ID NO:05, or fragment thereof. In an aspect, a disclosed CAR can comprise an amino acid sequence having at least 70%, at least 75%, at least 80%, at least 85%, at least 90%, or at least 95% identity to the sequence set forth in SEQ ID NO:02, SEQ ID NO:06, or fragment thereof. In an aspect, a disclosed CAR can comprise an amino acid sequence having at least 70%, at least 75%, at least 80%, at least 85%, at least 90%, or at least 95% identity to the sequence set forth in SEQ ID NO:03, SEQ ID NO:07, or fragment thereof.

[0135] In an aspect, a disclosed CAR can stimulate an effector cell mediated immune modulator response to PS-expressing tumor cells. In an aspect, a disclosed CAR can induce a tumor reducing immune response. In an aspect, a disclosed CAR can induce phagocytosis of cancer cells in the subject. In an aspect, a disclosed CAR can cross-prime an anti-tumor T cell response. In an aspect, a disclosed CAR can induce a tumor eliminating immune response. In an aspect, a disclosed CAR can treat cancer.

[0136] Disclosed herein is a chimeric antigen receptor (CAR), comprising from N-terminus to C-terminus a signal peptide; an antigen binding domain; a hinge domain; a transmembrane domain; and an intracellular domain comprising one or more immunoreceptor tyrosine-based activation domains (ITAMs) and/or one or more co-stimulatory domains. Disclosed herein s a chimeric antigen receptor (CAR), comprising from N-terminus to C-terminus a signal peptide; an antigen binding domain; a hinge domain; a transmembrane domain; an intracellular domain, a cleavage signal; a signal peptide; and a tumor-specific antigen or fragment thereof.

[0137] In an aspect, a disclosed CAR can be introduced to T cells and/or NK and/or macrophages or any other immune system. In an aspect, a disclosed CAR can be used to activated one or more types of immune cells (e.g., naive T cells, central memory T cells, effector memory T cells, NK cells or combination thereof) upon antigen binding.

### 2. Isolated Nucleic Acid Molecules

[0138] Disclosed herein is an isolated nucleic acid molecule comprising a nucleic acid sequence encoding any disclosed CAR. Disclosed herein is an isolated nucleic acid molecule comprising a nucleic acid sequence encoding a CAR specific for phosphatidylserine (PS). Disclosed herein is an isolated nucleic acid molecule comprising a nucleic acid sequence encoding a CAR comprising an extracellular domain comprising an antigen binding domain, a transmembrane domain, and an intracellular domain comprising one or more immunostimulatory domains.

[0139] Disclosed herein is an isolated nucleic acid molecule comprising a nucleic acid sequence encoding a CAR comprising from N-terminus to C-terminus a signal peptide; an antigen binding domain; a hinge domain; a transmembrane domain; and an intracellular domain comprising one or more immunoreceptor tyrosine-based activation domains (ITAMs) and/or one or more co-stimulatory domains. Disclosed herein is an isolated nucleic acid molecule comprising a nucleic acid sequence encoding a CAR comprising from N-terminus to C-terminus a signal peptide; an antigen binding domain; a hinge domain; a transmembrane domain; an intracellular domain, a cleavage signal; a signal peptide; and a tumor-specific antigen or fragment thereof. Disclosed herein is an isolated nucleic acid molecule comprising a nucleic acid sequence encoding a phosphatidylserine-specific CAR comprising an extracellular domain comprising an antigen binding domain, a transmembrane domain, and an intracellular domain comprising one or more immunostimulatory domains.

[0140] Disclosed herein is an isolated nucleic acid molecule comprising a nucleic acid sequence encoding a phosphatidylserine-specific CAR comprising from N-terminus to C-terminus a signal peptide; an antigen binding domain; a hinge domain; a transmembrane domain; and an intracellular domain comprising one or more immunoreceptor tyrosine-based activation domains (ITAMs) and/or one or more co-stimulatory domains.

[0141] Disclosed herein is an isolated nucleic acid molecule comprising a nucleic acid sequence encoding a phosphatidylserine-specific CAR comprising from N-terminus to C-terminus a signal peptide; an antigen binding domain; a hinge domain; a transmembrane domain; an intracellular domain, a cleavage signal; a signal peptide; and a tumor specific antigen or fragment thereof.

[0142] Disclosed herein is an isolated nucleic acid molecule comprising a nucleic acid sequence encoding a CAR comprising the sequence set forth in SEQ ID NO:01, SEQ ID NO:02, or SEQ ID NO: 03. Disclosed herein is an isolated nucleic acid molecule comprising a nucleic acid sequence encoding a CAR comprising the sequence set forth in SEQ ID NO:05, SEQ ID NO:06, or SEQ ID NO: 07. Disclosed herein is an isolated nucleic acid molecule comprising a nucleic acid sequence encoding a CAR comprising a sequence having at least 70%, at least 75%, at least 80%, at least 85%, at least 90%, or at least 95% identity to the sequence set forth in SEQ ID NO:01, SEQ ID NO: 02, or SEQ ID NO:03. Disclosed herein is an isolated nucleic acid molecule comprising a nucleic acid sequence encoding a CAR comprising a sequence having at least 70%, at least 75%, at least 80%, at least 85%, at least 90%, or at least 95% identity to the sequence set forth in SEQ ID NO: 05, SEQ ID NO:06, or SEQ ID NO:07.

[0143] In an aspect of a disclosed isolated nucleic acid molecule encoding a phosphatidylserine-specific CAR, the extracellular domain can further comprise a signal peptide. In an aspect, a disclosed signal peptide can comprise a CD8 signal peptide. In an aspect, a disclosed CD8 signal peptide can comprise the sequence set forth in SEQ ID NO:08 or a fragment thereof. In an aspect, a disclosed CD8 signal peptide can comprise a sequence having at least 70%, at least 75%, at least 80%, at least 85%, at least 90%, or at least 95% identity to the sequence set forth in SEQ ID NO:08 or a fragment thereof.

[0144] In an aspect of a disclosed isolated nucleic acid molecule encoding a phosphatidylserine-specific CAR, the extracellular domain can further comprise a phosphatidylserine (PS) binding domain. In an aspect, a disclosed PS binding domain can comprise Annexin A1 (ANXA1) or the PS-binding core domain, Annexin A2 (ANXA1), Annexin A3 (ANXA1), Annexin A4 (ANXA1), Annexin A5 (ANXA1), Annexin A6 (ANXA1), Annexin A7 (ANXA1), Annexin A8 (ANXA1), Annexin A8 Like 1 (ANXA1), Annexin A9 (ANXA1), Annexin A10 (ANXA1), Annexin A11 (ANXA1), Annexin A13 (ANXA1), Adhesion G Protein Coupled Receptor B1 (ADGRB1) or the extracellular domain thereof, Apolipoprotein H (APO-H), Coagulation Factor II (F2), Coagulation Factor VII (F7), Coagulation Factor IX (F9), Coagulation Factor X (F10), Growth Arrest Specific 6 (CAS6), Milk Fat Globule EGF And Factor V/VIII Domain Containing (MFGE8), Advanced Glycosylation End-Product Specific Receptor (AGER) or the extracellular domain thereof, Jumonji Domain-Containing Protein 6 (JMJD6); Protein S (PROS1), Hepatitis A Virus Cellular Receptor 1 (HAVCR1) or the extracellular domain thereof, Hepatitis A Virus Cellular Receptor 2 (HAVCR2) or the extracellular domain thereof, T Cell Immunoglobulin and Mucin Domain Containing (TIM-3) or the extracellular domain thereof, Protein Kinase C Alpha (PRKCA) or the C2 domain thereof, Synaptotagmin (SYT1) or the C2A domain thereof, Stabilin-1 (STAB1) or the extracellular domain thereof, Stabilin-2 (STAB2) or the extracellular domain thereof, or any combination thereof.

[0145] In an aspect of a disclosed isolated nucleic acid molecule, a disclosed encoded ANXA1 can comprise the amino acid sequence set forth in SEQ ID NO:19 or a fragment thereof. In an aspect, a disclosed encoded ANXA1 signal peptide can comprise a sequence having at least 70%, at least 75%, at least 80%, at least 85%, at least 90%, or at least 95% identity to the sequence set forth in SEQ ID NO:19 or a fragment thereof. In an aspect, a disclosed encoded ANXA1 can comprise the amino acid sequence set forth in SEQ ID NO:20 or a fragment thereof. In an aspect, a disclosed encoded ANXA1 signal peptide can comprise a sequence having at least 70%, at least 75%, at least 80%, at least 85%, at least 90%, or at least 95% identity to the sequence set forth in SEQ ID NO:20 or a fragment thereof. In an aspect, a disclosed encoded ANXA2 can comprise the amino acid sequence set forth in SEQ ID NO:21 or a fragment thereof. In an aspect, a disclosed encoded ANXA2 signal peptide can comprise a sequence having at least 70%, at least 75%, at least 80%, at least 85%, at least 90%, or at least 95% identity to the sequence set forth in SEQ ID NO: 21 or a fragment thereof. In an aspect, a disclosed encoded ANXA3 can comprise the amino acid sequence set forth in SEQ ID NO:22 or a fragment thereof. In an aspect, a disclosed encoded ANXA3 signal peptide can comprise a sequence having at least 70%, at least 75%, at least 80%, at least 85%, at least 90%, or at least 95% identity to the sequence set forth in SEQ ID NO:22 or a fragment thereof. In an aspect, a disclosed encoded ANXA4 can comprise the amino acid sequence set forth in SEQ ID NO:23 or a fragment thereof. In an aspect, a disclosed encoded ANXA4 signal peptide can comprise a sequence having at least 70%, at least 75%, at least 80%, at least 85%, at least 90%, or at least 95% identity to the sequence set forth in SEQ ID NO:23 or a fragment thereof. In an aspect, a disclosed encoded ANXA5 can comprise the amino acid sequence set forth in SEQ ID NO:24 or a fragment thereof. In an aspect, a disclosed encoded ANXA5 signal peptide can comprise a sequence having at least 70%, at least 75%, at least 80%, at least 85%, at least 90%, or at least 95% identity to the sequence set forth in SEQ ID NO:24 or a fragment thereof. In an aspect, a disclosed encoded ANXA6 can comprise the amino acid sequence set forth in SEQ ID NO:25 or a fragment thereof. In an aspect, a disclosed encoded ANXA6 signal peptide can comprise a sequence having at least 70%, at least 75%, at least 80%, at least 85%, at least 90%, or at least 95% identity to the sequence set forth in SEQ ID NO:25 or a fragment thereof. In an aspect, a disclosed encoded ANXA7 can comprise the amino acid sequence set forth in SEQ ID NO:26 or a fragment thereof. In an aspect, a disclosed encoded ANXA7 signal peptide can comprise a sequence having at least 70%, at least 75%, at least 80%, at least 85%, at least 90%, or at least 95% identity to the sequence set forth in SEQ ID NO:26 or a fragment thereof. In an aspect, a disclosed encoded ANXA8 can comprise the amino acid sequence set forth in SEQ ID NO:27 or a fragment thereof. In an aspect, a disclosed encoded ANXA8 signal peptide can comprise a sequence having at least 70%, at least 75%, at least 80%, at least 85%, at least 90%, or at least 95% identity to the sequence set forth in SEQ ID NO:27 or a fragment thereof. In an aspect, a disclosed encoded ANXA8L can comprise the amino acid sequence set forth in SEQ ID NO:28 or a fragment thereof. In an aspect, a disclosed encoded ANXA8L signal peptide can comprise a sequence having at least 70%, at least 75%, at least 80%, at least 85%, at least 90%, or at least 95% identity to the sequence set forth in SEQ ID NO:28 or a fragment thereof. In an aspect, a disclosed encoded ANXA9 can comprise the amino acid sequence set forth in SEQ ID NO:29 or a fragment thereof. In an aspect, a disclosed encoded ANXA9 signal peptide can comprise a sequence having at least 70%, at least 75%, at least 80%, at least 85%, at least 90%, or at least 95% identity to the sequence set forth in SEQ ID NO:29 or a fragment thereof. In an aspect, a disclosed encoded ANXA10 can comprise the amino acid sequence set forth in SEQ ID NO:30 or a fragment thereof. In an aspect, a disclosed encoded ANXA10 signal peptide can comprise a sequence having at least 70%, at least 75%, at least 80%, at least 85%, at least 90%, or at least 95% identity to the sequence set forth in SEQ ID NO:30 or a fragment thereof. In an aspect, a disclosed encoded ANXA11 can comprise the amino acid sequence set forth in SEQ ID NO:31 or a fragment thereof. In an aspect, a disclosed encoded ANXA11 signal peptide can comprise a sequence having at least 70%, at least 75%, at least 80%, at least 85%, at least 90%, or at least 95% identity to the sequence set forth in SEQ ID NO:31 or a fragment thereof. In an aspect, a disclosed encoded ANXA13 can comprise the amino acid sequence set forth in SEQ ID NO:32 or a fragment thereof. In an aspect, a disclosed encoded ANXA13 signal peptide can comprise a sequence having at least 70%, at least 75%, at least 80%, at least 85%, at least 90%, or at least 95% identity to the sequence set forth in SEQ ID NO:32 or a fragment thereof.

[0146] In an aspect of a disclosed isolated nucleic acid molecule, a disclosed encoded ADGRB1 can comprise the amino acid sequence set forth in SEQ ID NO:33 or a fragment thereof. In an aspect, a disclosed encoded ADGRB1 signal peptide can comprise a sequence having at least 70%, at least 75%, at least 80%, at least 85%, at least 90%, or at least 95% identity to the sequence set forth in SEQ ID NO:33 or a fragment thereof. In an aspect, a disclosed encoded ADGRB1 can comprise the amino acid sequence set forth in SEQ ID NO:34 or a fragment thereof. In an aspect, a disclosed encoded ADGRB1 signal peptide can comprise a sequence having at least 70%, at least 75%, at least 80%, at least 85%, at least 90%, or at least 95% identity to the sequence set forth in SEQ ID NO:34 or a fragment thereof. In an aspect, a disclosed encoded APO-H can comprise the amino acid sequence set forth in SEQ ID NO:35 or a fragment thereof. In an aspect, a disclosed encoded APO-H can comprise a sequence having at least 70%, at least 75%, at least 80%, at least 85%, at least 90%, or at least 95% identity to the sequence set forth in SEQ ID NO:35 or a fragment thereof. In an aspect, a disclosed encoded F2 can comprise the amino acid sequence set forth in SEQ ID NO:36 or a fragment thereof. In an aspect, a disclosed encoded F2 can comprise a sequence having at least 70%, at least 75%, at least 80%, at least 85%, at least 90%, or at least 95% identity to the sequence set forth in SEQ ID NO:36 or a fragment thereof. In an aspect, a disclosed encoded F7 can comprise the amino acid sequence set forth in SEQ ID NO:37 or a fragment thereof. In an aspect, a disclosed encoded F7 can comprise a sequence having at least 70%, at least 75%, at least 80%, at least 85%, at least 90%, or at least 95% identity to the sequence set forth in SEQ ID NO:37 or a fragment thereof. In an aspect, a disclosed encoded F9 can comprise the amino acid sequence set forth in SEQ ID NO:38 or a fragment thereof. In an aspect, a disclosed encoded F9 can comprise a sequence having at least 70%, at least 75%, at least 80%, at least 85%, at least 90%, or at least 95% identity to the sequence set forth in SEQ ID NO:38 or a fragment thereof. In an aspect, a disclosed encoded F10 can comprise the amino acid sequence set forth in SEQ ID NO:39 or a fragment thereof. In an aspect, a disclosed encoded F10 can comprise a sequence having at least 70%, at least 75%, at least 80%, at least 85%, at least 90%, or at least 95% identity to the sequence set forth in SEQ ID NO:39 or a fragment thereof. In an aspect, a disclosed encoded GAS6 can comprise the amino acid sequence set forth in SEQ ID NO: 40 or a fragment thereof. In an aspect, a disclosed encoded GAS6 an comprise a sequence having at least 70%, at least 75%, at least 80%, at least 85%, at least 90%, or at least 95% identity to the sequence set forth in SEQ ID NO:40 or a fragment thereof. In an aspect, a disclosed encoded MFGE8 can comprise the amino acid sequence set forth in SEQ ID NO:41 or a fragment thereof. In an aspect, a disclosed encoded MFGE8 can comprise a sequence having at least 70%, at least 75%, at least 80%, at least 85%, at least 90%, or at least 95% identity to the sequence set forth in SEQ ID NO:41 or a fragment thereof. In an aspect, a disclosed encoded AGER can comprise the amino acid sequence set forth in SEQ ID NO:42 or a fragment thereof. In an aspect, a disclosed encoded AGER can comprise a sequence having at least 70%, at least 75%, at least 80%, at least 85%, at least 90%, or at least 95% identity to the sequence set forth in SEQ ID NO:42 or a fragment thereof. In an aspect, a disclosed encoded AGER can comprise the amino acid sequence set forth in SEQ ID NO:43 or a fragment thereof. In an aspect, a disclosed encoded AGER can comprise a sequence having at least 70%, at least 75%, at least 80%, at least 85%, at least 90%, or at least 95% identity to the sequence set forth in SEQ ID NO:43 or a fragment thereof. In an aspect, a disclosed encoded PROS1 can comprise the amino acid sequence set forth in SEQ ID NO:44 or a fragment thereof. In an aspect, a disclosed encoded PROS1 can comprise a sequence having at least 70%, at least 75%, at least 80%, at least 85%, at least 90%, or at least 95% identity to the sequence set forth in SEQ ID NO:44 or a fragment thereof. In an aspect, a disclosed encoded STAB1 can comprise the amino acid sequence set forth in SEQ ID NO:45 or a fragment thereof. In an aspect, a disclosed encoded STAB1 can comprise a sequence having at least 70%, at least 75%, at least 80%, at least 85%, at least 90%, or at least 95% identity to the sequence set forth in SEQ ID NO:45 or a fragment thereof. In an aspect, a disclosed encoded STAB1 can comprise the amino acid sequence set forth in SEQ ID NO:46 or a fragment thereof. In an aspect, a disclosed encoded STAB1 can comprise a sequence having at least 70%, at least 75%, at least 80%, at least 85%, at least 90%, or at least 95% identity to the sequence set forth in SEQ ID NO:46 or a fragment thereof. In an aspect, a disclosed encoded STAB2 can comprise the amino acid sequence set forth in SEQ ID NO:47 or a fragment thereof. In an aspect, a disclosed encoded STAB2 can comprise a sequence having at least 70%, at least 75%, at least 80%, at least 85%, at least 90%, or at least 95% identity to the sequence set forth in SEQ ID NO:47 or a fragment thereof. In an aspect, a disclosed encoded STAB2 can comprise the amino acid sequence set forth in SEQ ID NO:48 or a fragment thereof. In an aspect, a disclosed encoded STAB2 can comprise a sequence having at least 70%, at least 75%, at least 80%, at least 85%, at least 90%, or at least 95% identity to the sequence set forth in SEQ ID NO:48 or a fragment thereof. In an aspect, a disclosed encoded HAVCR1 can comprise the amino acid sequence set forth in SEQ ID NO:49 or a fragment thereof. In an aspect, a disclosed encoded HAVCR1 can comprise a sequence having at least 70%, at least 75%, at least 80%, at least 85%, at least 90%, or at least 95% identity to the sequence set forth in SEQ ID NO:49 or a fragment thereof. In an aspect, a disclosed encoded HAVCR1 can comprise the amino acid sequence set forth in SEQ ID NO:50 or a fragment thereof. In an aspect, a disclosed encoded HAVCR1 can comprise a sequence having at least 70%, at least 75%, at least 80%, at least 85%, at least 90%, or at least 95% identity to the sequence set forth in SEQ ID NO:50 or a fragment thereof. In an aspect, a disclosed encoded HAVCR2 can comprise the amino acid sequence set forth in SEQ ID NO:51 or a fragment thereof. In an aspect, a disclosed encoded HAVCR2 can comprise a sequence having at least 70%, at least 75%, at least 80%, at least 85%, at least 90%, or at least 95% identity to the sequence set forth in SEQ ID NO:51 or a fragment thereof. In an aspect, a disclosed encoded HAVCR2 can comprise the amino acid sequence set forth in SEQ ID NO:52 or a fragment thereof. In an aspect, a disclosed encoded HAVCR2 can comprise a sequence having at least 70%, at least 75%, at least 80%, at least 85%, at least 90%, or at least 95% identity to the sequence set forth in SEQ ID NO:52 or a fragment thereof. In an aspect, a disclosed encoded TIMD4 can comprise the amino acid sequence set forth in SEQ ID NO: 53 or a fragment thereof. In an aspect, a disclosed encoded TIMD4 can comprise a sequence having at least 70%, at least 75%, at least 80%, at least 85%, at least 90%, or at least 95% identity to the sequence set forth in SEQ ID NO:53 or a fragment thereof. In an aspect, a disclosed encoded TIMD4 can comprise the amino acid sequence set forth in SEQ ID NO:54 or a fragment thereof. In an aspect, a disclosed encoded TIMD4 can comprise a sequence having at least 70%, at least 75%, at least 80%, at least 85%, at least 90%, or at least 95% identity to the sequence set forth in SEQ ID NO:54 or a fragment thereof. In an aspect, a disclosed encoded PRKCA can comprise the amino acid sequence set forth in SEQ ID NO:55 or a fragment thereof. In an aspect, a disclosed encoded PRKCA can comprise a sequence having at least 70%, at least 75%, at least 80%, at least 85%, at least 90%, or at least 95% identity to the sequence set forth in SEQ ID NO:55 or a fragment thereof. In an aspect, a disclosed encoded PRKCA can comprise the amino acid sequence set forth in SEQ ID NO:56 or a fragment thereof. In an aspect, a disclosed encoded PRKCA can comprise a sequence having at least 70%, at least 75%, at least 80%, at least 85%, at least 90%, or at least 95% identity to the sequence set forth in SEQ ID NO:56 or a fragment thereof. In an aspect, a disclosed encoded SYT1 can comprise the amino acid sequence set forth in SEQ ID NO: 57 or a fragment thereof. In an aspect, a disclosed encoded SYT1 can comprise a sequence having at least 70%, at least 75%, at least 80%, at least 85%, at least 90%, or at least 95% identity to the sequence set forth in SEQ ID NO:57 or a fragment thereof. In an aspect, a disclosed encoded SYT1 can comprise the amino acid sequence set forth in SEQ ID NO:58 or a fragment thereof. In an aspect, a disclosed encoded SYT1 can comprise a sequence having at least 70%, at least 75%, at least 80%, at least 85%, at least 90%, or at least 95% identity to the sequence set forth in SEQ ID NO:58 or a fragment thereof. In an aspect, a disclosed encoded JMJD6 can comprise the amino acid sequence set forth in SEQ ID NO:59 or a fragment thereof. In an aspect, a disclosed encoded JMJD6 can comprise a sequence having at least 70%, at least 75%, at least 80%, at least 85%, at least 90%, or at least 95% identity to the sequence set forth in SEQ ID NO:59 or a fragment thereof.

[0147] In an aspect of a disclosed isolated nucleic acid molecule, a disclosed encoded PS binding domain can comprise the single-chain variable domain of bavituximab. In an aspect, a disclosed encoded PS binding domain can comprise the sequence set forth in SEQ ID NO:73 or a fragment thereof. In an aspect, a disclosed encoded PS binding chain can comprise a sequence having at least 70%, at least 75%, at least 80%, at least 85%, at least 90%, or at least 95% identity to the sequence set forth in SEQ ID NO:73 or a fragment thereof. In an aspect, a disclosed encoded PS binding domain can comprise the single-chain variable domain of PGN632. In an aspect, a single-chain variable domain of PGN632 can comprise a γ1 heavy chain and a 2 light chain. In an aspect, a single-chain variable domain of PGN632 can bind to cardiolipin/PS. In an aspect, a disclosed encoded PS binding domain can comprise the single-chain variable domain of P1. In an aspect, a single-chain variable domain of P1 can comprise a γ1 heavy chain and a λ light chain. In an aspect, a single-chain variable domain of P1 can bind to cardiolipin/PS. In an aspect, a disclosed encoded PS binding domain can comprise the single-chain variable domain of IS4. In an aspect, a single-chain variable domain of IS4 can comprise a γ3 VH1 heavy chain and a λ Vλ2 light chain. In an aspect, a single-chain variable domain of IS4 can bind to cardiolipin/PS. In an aspect, a disclosed encoded PS binding domain can comprise the single-chain variable domain of CL1. In an aspect, a single-chain variable domain of CLL can comprise a γ3 VH1 heavy chain and a λ Vλ3 light chain. In an aspect, a single-chain variable domain of IS4 can bind to cardiolipin/PS.

[0148] In an aspect, a disclosed antigen binding domain can be a scFV and wherein the scFV can comprise a linker. In an aspect, a disclosed encoded linker can join the V_{H} and V_{L} regions of the ScFv. In an aspect of a disclosed isolated nucleic acid molecule encoding a phosphatidylserine-specific CAR, the spacer domain can comprise an immunoglobulin hinge region, an extracellular region of a type 1 membrane proteins, a part or all of an immunoglobulin constant region, or any combination thereof.

[0149] In an aspect of a disclosed isolated nucleic acid molecule encoding a phosphatidylserine-specific CAR, the spacer domain can comprise a hinge region. In an aspect, a disclosed encoded hinge region can comprise a hinge region of CD8a, CD28, IgG1, IgG2, IgG3, IgG4, IgA, IgD, or any combination thereof. In an aspect, a disclosed CD8a hinge domain can comprise the sequence set forth in SEQ ID NO:09 or a fragment thereof. In an aspect, a disclosed encoded hinge region can be from or can be derived from CD2, CD3 delta, CD3 epsilon, CD3 gamma, CD4, CD7, CD8a, CD813, CD11a (ITGAL), CD11b (ITGAM), CD11c (ITGAX), CD11d (ITGAD), CD18 (ITGB2), CD19 (B4), CD27 (TNFRSF7), CD28, CD28T, CD29 (ITGB1), CD30 (TNFRSF8), CD40 (TNFRSF5), CD48 (SLAMF2), CD49a (ITGA1), CD49d (ITGA4), CD49f (ITGA6), CD66a (CEACAM1), CD66b (CEACAM8), CD66c (CEACAM6), CD66d (CEACAM3), CD66e (CEACAM5), CD69 (CLEC2), CD79A (B-cell antigen receptor complex-associated alpha chain), CD79B (B-cell antigen receptor complex-associated beta chain), CD84 (SLAMF5), CD96 (Tactile), CD100 (SEMA4D), CD103 (ITGAE), CD134 (OX40), CD137 (4-1BB), CD150 (SLAMF1), CD158A (KIR2DL1), CD158B1 (KIR2DL2), CD158B2 (KIR2DL3), CD158C (KIR3DP1), CD158D (KIRDL4), CD158F1 (KIR2DL5A), CD158F2 (KIR2DL5B), CD158K (KIR3DL2), CD160 (BY55), CD162 (SELPLG), CD226 (DNAMI), CD229 (SLAMF3), CD244 (SLAMF4), CD247 (CD3-zeta), CD258 (LIGHT), CD268 (BAFFR), CD270 (TNFSF14), CD272 (BTLA), CD276 (B7-H3), CD279 (PD-1), CD314 (NKG2D), CD319 (SLAMF7), CD335 (NK-p46), CD336 (NK-p44), CD337 (NK-p30), CD352 (SLAMF6), CD353 (SLAMF8), CD355 (CRTAM), CD357 (TNFRSF18), inducible T cell co-stimulator (ICOS), LFA-1 (CD11a/CD18), NKG2C, DAP-10, ICAM-1, NKp80 (KLRF1), IL-2R beta, IL-2R gamma, IL-7R alpha, LFA1-1, SLAMF9, LAT, GADS (GrpL), SLP-76 (LCP2), PAG1/CBP, a CD83 ligand, Fc gamma receptor, MHC class 1 molecule, MHC class 2 molecule, a TNF receptor protein, an immunoglobulin protein, a cytokine receptor, an integrin, activating NK cell receptors, Toll ligand receptor, or any combination thereof, or any fragment/truncation thereof, or any combination of fragments/truncations thereof.

[0150] In an aspect of a disclosed isolated nucleic acid molecule encoding a phosphatidylserine-specific CAR, the transmembrane domain can further comprise a transmembrane domain of CD2, CD3γ, CD3ε, CD3δ, CD3ξ, CD4, CD8, CD25, CD27, CD28, CD40, CD79A, CD79B, CD79B, CD80, CD86, CD95 (FAS), CD134 (OX40), CD137 (4-1BB), CD154, CD278 (ICOS), TCRα, TCRβ, NKG2D, 2B4, or any combination thereof. In an aspect, a disclosed encoded CD28 transmembrane domain can comprise the sequence set forth in SEQ ID NO:12 or a fragment thereof. In an aspect, a disclosed encoded transmembrane domain can comprise a CD28 transmembrane domain or a truncated CD28 domain. In an aspect, a disclosed encoded transmembrane domain can be from or can be derived from the alpha, beta or zeta chain of a T-cell receptor, 2B4, CD28, CD3 epsilon, CD3 delta, CD3 gamma, CD45, CD4, CD5, CD7, CD8, CD8 alpha, CD8beta, CD9, CD11a, CD11b, CD11c, CD11d, CD16, CD22, CD27, CD33, CD37, CD64, CD80, CD86, CD134, CD137, TNFSFR25, CD154, 4-1BB/CD137, activating NK cell receptors, an Immunoglobulin protein, B7-H3, BAFFR, BLAME (SLAMF8), BTLA, CD100 (SEMA4D), CD103, CD160 (BY55), CD18, CD19, CD19a, CD2, CD247, CD276 (B7-H3), CD29, CD30, CD40, CD49a, CD49D, CD49f, CD69, CD84, CD96 (Tactile), CDS, CEACAM1, CRT AM, cytokine receptor, DAP-10, DAP-12, DNAMI (CD226), Fc gamma receptor, GADS, GITR, HVEM (LIGHTR), IA4, ICAM-1, ICAM-1, Ig alpha (CD79a), IL-2R beta, IL-2R gamma, IL-7R alpha, inducible T cell costimulator (ICOS), integrins, ITGA4, ITGA4, ITGA6, ITGAD, ITGAE, ITGAL, ITGAM, ITGAX, ITGB2, ITGB7, ITGB1, KIRDS2, LAT, LFA-1, LFA-1, a ligand that binds with CD83, LIGHT, LIGHT, LTBR, Ly9 (CD229), lymphocyte function-associated antigen-1 (LFA-1; CD1-1a/CD18), MHC class 1 molecule, NKG2C, NKG2D, NKp30, NKp44, NKp46, NKp80 (KLRF1), OX-40, PAG/Cbp, programmed death-1 (PD-1), PSGL1, SELPLG (CD162), Signaling Lymphocytic Activation Molecules (SLAM proteins), SLAM (SLAMF1; CD150; IPO-3), SLAMF4 (CD244; 2B4), SLAMF6 (NTB-A; Ly108), SLAMF7, SLP-76, TNF receptor proteins, TNFR2, TNFSF14, a Toll ligand receptor, TRANCE/RANKL, VLA1, or VLA-6, or a combination thereof, or a fragment/truncation thereof, or a combination of fragments and/or truncations thereof.

[0151] In an aspect of a disclosed isolated nucleic acid molecule encoding a phosphatidylserine-specific CAR, the encoded intracellular domain can comprise the intracellular domain of CD28. In an aspect, a disclosed intracellular domain of CD28 can comprise the sequence set froth in SEQ ID NO: 11 or a fragment thereof. In an aspect, a disclosed encoded intracellular domain can comprise one or more immunoreceptor tyrosine-based activation domains (ITAMs). In an aspect, a disclosed ITAM can comprise the signaling domain of DAP10, DAP12, TCRζ, FcRγ, FcRβ, CD3γ, CD3ξ, CD3ε, CD3δ, CD3ξ, CD5, CD22, CD66d, CD79a, CD79b, CD278 (ICOS), or any combination thereof.

[0152] In an aspect, a disclosed encoded intracellular domain can further comprise one or more co-stimulatory domains. In an aspect, a disclosed encoded co-stimulatory domain can comprise the signaling domain of CD27, CD28, 4-1BB, OX40, CD30, CD40, PD-1, ICOS (CD278), LFA-1, CD2, CD7 LIGHT, NKG2C, B7-H3, or any combination thereof. In an aspect, a disclosed encoded costimulatory molecule can comprise 4-1BB/CD137, B7-H3, BAFFR, BLAME (SLAMF8), BTLA, CD 33, CD 45, CD100 (SEMA4D), CD103, CD134, CD137, CD154, CD16, CD160 (BY55), CD18, CD19, CD19a, CD2, CD22, CD247, CD27, CD276 (B7-H3), CD28, CD29, CD3 (alpha, beta, delta, epsilon, gamma, zeta), CD30, CD37, CD4, CD4, CD40, CD49a, CD49D, CD49f, CD5, CD64, CD69, CD7, CD80, CD83 ligand, CD84, CD86, CD8alpha, CD8beta, CD9, CD96 (Tactile), CD1-1a, CD1-1b, CD1-1c, CD1-1d, CDS, CEACAM1, CRT AM, DAP-10, DNAMI (CD226), Fc gamma receptor, GADS, GITR, HVEM (LIGHTR), IA4, ICAM-1, ICAM-1, ICOS, Ig alpha (CD79a), IL2R beta, IL2R gamma, IL7R alpha, integrin, ITGA4, ITGA4, ITGA6, ITGAD, ITGAE, ITGAL, ITGAM, ITGAX, ITGB2, ITGB7, ITGB1, KIRDS2, LAT, LFA-1, LFA-1, LIGHT, LIGHT (tumor necrosis factor superfamily member 14; TNFSF14), LTBR, Ly9 (CD229), lymphocyte function-associated antigen-1 (LFA-1 (CD11a/CD18), MHC class I molecule, NKG2C, NKG2D, NKp30, NKp44, NKp46, NKp80 (KLRF1), OX40, PAG/Cbp, PD-1, PSGL1, SELPLG (CD162), signaling lymphocytic activation molecule, SLAM (SLAMF1; CD150; IPO-3), SLAMF4 (CD244; 2B4), SLAMF6 (NTB-A; Ly108), SLAMF7, SLP-76, TNF, TNFr, TNFR2, Toll ligand receptor, TRANCE/RANKL, VLA1, or VLA-6, or fragments, truncations, or combinations thereof.

[0153] In an aspect of a disclosed isolated nucleic acid molecule, a disclosed encoded intracellular domain can comprise an ITAM and one or more co-stimulatory domains, wherein the ITAM can comprise the signaling domain of CD3γ, CD3ξ, CD3ε, CD3δ, CD3ξ, CD5, CD22, CD79a, CD278 (ICOS), or any combination thereof, and wherein the co-stimulatory domains can comprises the signaling domain of CD27, CD28, 4-1BB, OX40, CD30, CD40, PD-1, ICOS, LFA-1, CD2, CD7 LIGHT, NKG2C, B7-H3, or any combination thereof.

[0154] In an aspect of a disclosed isolated nucleic acid molecule, a disclosed encoded intracellular domain can comprise one or more ITAMs and one or more co-stimulatory domains, wherein the ITAMs can comprise the signaling domain of CD3γ, CD3ξ, CD3ε, CD3δ, CD3ξ, CD5, CD22, CD79a, CD278 (ICOS), or any combination thereof, and wherein the co-stimulatory domains can comprise the signaling domain of CD27, CD28, 4-1BB, OX40, CD30, CD40, PD-1, ICOS, LFA-1, CD2, CD7 LIGHT, NKG2C, B7-H3, or any combination thereof.

[0155] In an aspect, the disclosed two co-stimulatory domains can comprise two of the same signaling domain. In an aspect, the disclosed two co-stimulatory domains can comprise two different signaling domains. In an aspect, a disclosed 4-1BB signaling domain can comprise the sequence set forth in SEQ ID NO:13 or a fragment thereof. In an aspect, a disclosed CD3g signaling domain comprises the sequence set forth in SEQ ID NO:14 or a fragment thereof.

[0156] In an aspect of a disclosed isolated nucleic acid molecule, a disclosed encoded co-stimulatory domain can comprise CD28. In an aspect, a disclosed CD28 co-stimulatory domain can demonstrate one or more functional aspects: (i) lower persistence and differentiation towards effector memory phenotype compared to 41BB second-generation CARs, (ii) more prone to tonic signaling and causes early exhaustion, (iii) imparts resistance to Tregs in-vitro, in-vivo models however suggested that CD28 co-stimulation causes increased infiltration of Tregs and were less effective against tumors in presence of Tregs, (iv) resistant to CTLA4 inhibition, (v) raster and higher signaling intensity, (vi) does not alter scFv “affinity ceiling”-affinity beyond which IFNγ, IL2 secretion and cytotoxicity do not increase, or (vii) any combination thereof.

[0157] In an aspect of a disclosed isolated nucleic acid molecule, a disclosed encoded co-stimulatory domain can comprise 4-1BB. In an aspect, a disclosed 4-1BB co-stimulatory domain can demonstrate one or more functional aspects: (i) greater persistence and differentiation towards central memory phenotype compared to CD28 second-generation CARs, (ii) can reduce tonic signaling at optimal expression levels and decrease exhaustion, (iii) slower and less intense signaling, or (iv) any combination thereof.

[0158] In an aspect of a disclosed isolated nucleic acid molecule, a disclosed encoded intracellular domain can further comprise a self-cleaving peptide. In an aspect, a disclosed self-cleaving peptide can comprise a T2A, a P2A, a E2A, or F2A peptide. In an aspect, a GSG linker can be added to the N-terminus of a disclosed 2A peptide. In an aspect, a disclosed encoded P2A peptide can comprise the sequence set forth in SEQ ID NO:15 or SEQ ID NO:102 or a fragment thereof. In an aspect, a disclosed encoded T2A peptide can comprise the sequence set forth in SEQ ID NO: 103 or SEQ ID NO:104 or a fragment thereof. In an aspect, a disclosed encoded E2A peptide can comprise the sequence set forth in SEQ ID NO: 105 or SEQ ID NO: 106 or a fragment thereof. In an aspect, a disclosed encoded F2A peptide can comprise the sequence set forth in SEQ ID NO: 107 or SEQ ID NO:108 or a fragment thereof.

[0159] In an aspect of a disclosed isolated nucleic acid molecule, a disclosed encoded intracellular domain can further comprise a sequence encoding an EGFR domain or a truncated EGFR domain. In an aspect, a disclosed encoded EGFR domain can comprise the sequence set forth in SEQ ID NO: 17 or a fragment thereof. In an aspect, a disclosed encoded truncated EGFR domain can comprise the sequence set forth in SEQ ID NO:18 or a fragment thereof.

[0160] In an aspect of a disclosed isolated nucleic acid molecule, a disclosed encoded intracellular domain can further comprise a sequence encoding a self-cleaving peptide, a signal peptide, and an EGFR domain or truncated EGFR domain, or any combination thereof. In an aspect of a disclosed isolated nucleic acid molecule, a disclosed encoded intracellular domain comprising a disclosed self-cleaving peptide, the signal peptide, and the truncated EGFR domain can comprise the sequence set forth in SEQ ID NO:04 or a fragment thereof. In an aspect of a disclosed isolated nucleic acid molecule, a disclosed encoded intracellular domain comprising a disclosed self-cleaving peptide, the signal peptide, and the truncated EGFR domain can comprise a sequence having at least 70%, at least 75%, at least 80%, at least 85%, at least 90%, or at least 95% identity to the sequence set forth in SEQ ID NO:04, In an aspect of a disclosed isolated nucleic acid molecule, a disclosed encoded CAR can comprise a first-generation CAR, a second-generation CAR, a third-generation CAR, a fourth-generation CAR, or a fifth-generation CAR.

[0161] In an aspect, a disclosed isolated nucleic acid molecule can encode an amino acid sequence having the sequence set forth in SEQ ID NO:01, SEQ ID NO:05, or fragment thereof. In an aspect, a disclosed isolated nucleic acid molecule can encode an amino acid sequence having the sequence set forth in SEQ ID NO:02, SEQ ID NO:06, or fragment thereof. In an aspect, a disclosed isolated nucleic acid molecule can encode an amino acid sequence having the sequence set forth in SEQ ID NO: 03, SEQ ID NO:07, or fragment thereof. In an aspect, a disclosed isolated nucleic acid molecule can encode an amino acid sequence having at least 70%, at least 75%, at least 80%, at least 85%, at least 90%, or at least 95% identity to the sequence set forth in SEQ ID NO:01, SEQ ID NO: 05, or fragment thereof. In an aspect, a disclosed isolated nucleic acid molecule can encode an amino acid sequence having at least 70%, at least 75%, at least 80%, at least 85%, at least 90%, or at least 95% identity to the sequence set forth in SEQ ID NO:02, SEQ ID NO:06, or fragment thereof. In an aspect, a disclosed isolated nucleic acid molecule can encode an amino acid sequence having at least 70%, at least 75%, at least 80%, at least 85%, at least 90%, or at least 95% identity to the sequence set forth in SEQ ID NO:03, SEQ ID NO:07, or fragment thereof.

[0162] Disclosed herein in an isolated nucleic acid molecule comprising a nucleic acid sequence encoding a chimeric antigen receptor (CAR), comprising from N-terminus to C-terminus a signal peptide; an antigen binding domain; a hinge domain; a transmembrane domain; and an intracellular domain comprising one or more immunoreceptor tyrosine-based activation domains (ITAMs) and/or one or more co-stimulatory domains. Disclosed herein in an isolated nucleic acid molecule comprising a nucleic acid sequence encoding a chimeric antigen receptor (CAR), comprising from N-terminus to C-terminus a signal peptide; an antigen binding domain; a hinge domain; a transmembrane domain; an intracellular domain, a cleavage signal; a signal peptide; and a tumor-specific antigen or fragment thereof.

[0163] In an aspect, a disclosed isolated nucleic acid molecule can comprise a nucleic acid sequence encoding a signal peptide. In an aspect, a disclosed encoded intracellular domain can further comprise a self-cleaving peptide. In an aspect, a disclosed self-cleaving peptide can comprise a T2A, a P2A, a E2A, or F2A peptide. In an aspect, a GSG linker can be added to the N-terminus of a disclosed 2A peptide. In an aspect, a disclosed encoded P2A peptide can comprise the sequence set forth in SEQ ID NO:15 or SEQ ID NO: 102 or a fragment thereof. In an aspect, a disclosed encoded T2A peptide can comprise the sequence set forth in SEQ ID NO: 103 or SEQ ID NO: 104 or a fragment thereof. In an aspect, a disclosed encoded E2A peptide can comprise the sequence set forth in SEQ ID NO:105 or SEQ ID NO: 106 or a fragment thereof. In an aspect, a disclosed encoded F2A peptide can comprise the sequence set forth in SEQ ID NO: 107 or SEQ ID NO: 108 or a fragment thereof. In an aspect, a disclosed isolated nucleic acid molecule comprising a sequence encoding a disclosed intracellular domain can further comprise a nucleic acid sequence encoding an EGFR domain or a truncated EGFR domain. In an aspect, a disclosed encoded EGFR domain can comprise the sequence set forth in SEQ ID NO:17 or a fragment thereof. In an aspect, a disclosed encoded truncated EGFR domain can comprise the sequence set forth in SEQ ID NO:18 or a fragment thereof. In an aspect, a disclosed isolated nucleic acid molecule comprising a nucleic acid sequence encoding a disclosed intracellular domain can further comprise a nucleic acid sequence encoding a self-cleaving peptide, a signal peptide, and an EGFR domain or truncated EGFR domain, or any combination thereof. In an aspect, a disclosed isolated nucleic acid molecule comprising a nucleic acid sequence encoding a disclosed intracellular domain can further comprise a nucleic acid sequence encoding a disclosed self-cleaving peptide, the signal peptide, and the truncated EGFR domain can comprise the sequence set forth in SEQ ID NO:04 or a fragment thereof. In an aspect, a disclosed isolated nucleic acid molecule encoding a disclosed intracellular domain can further comprise a nucleic acid sequence encoding a disclosed self-cleaving peptide, the signal peptide, and the truncated EGFR domain can comprise a sequence having at least 70%, at least 75%, at least 80%, at least 85%, at least 90%, or at least 95% identity to the sequence set forth in SEQ ID NO:04 or a fragment thereof.

[0164] In an aspect, a disclosed isolated nucleic acid molecule can be introduced to T cells and/or NK cells. In an aspect, a disclosed isolated nucleic acid molecule can be used to activated one or more types of immune cells (e.g., naive T cells, central memory T cells, effector memory T cells, NK cells or combination thereof) upon antigen binding.

[0165] In an aspect, a disclosed isolated nucleic acid molecule can stimulate an effector cell mediated immune modulator response to PS-expressing tumor cells. In an aspect, a disclosed isolated nucleic acid molecule can induce a tumor reducing immune response. In an aspect, a disclosed isolated nucleic acid molecule can induce phagocytosis of cancer cells in the subject. In an aspect, a disclosed isolated nucleic acid molecule can cross-prime an anti-tumor T cell response. In an aspect, a disclosed isolated nucleic acid molecule can induce a tumor eliminating immune response. In an aspect, a disclosed isolated nucleic acid molecule can treat cancer.

### 3. Vectors

[0166] Disclosed herein is a vector comprising a disclosed isolated nucleic acid molecule. Disclosed herein is a vector comprising a disclosed nucleic acid sequence. Disclosed herein a vector comprising an isolated nucleic acid molecule comprising a nucleic acid sequence encoding any disclosed CAR. Disclosed herein a vector comprising an isolated nucleic acid molecule comprising a nucleic acid sequence encoding a CAR specific for phosphatidylserine (PS).

[0167] Disclosed herein a vector comprising an isolated nucleic acid molecule comprising a nucleic acid sequence encoding a CAR comprising an extracellular domain comprising an antigen binding domain, a transmembrane domain, and an intracellular domain comprising one or more immunostimulatory domains. Disclosed herein a vector comprising an isolated nucleic acid and an intracellular domain comprising one or more immunoreceptor tyrosine-based activation domains (ITAMs) and/or one or more co-stimulatory domains. Disclosed herein a vector comprising an isolated nucleic acid molecule comprising a nucleic acid sequence encoding a CAR comprising from N-terminus to C-terminus a signal peptide; an antigen binding domain; a hinge domain; a transmembrane domain; an intracellular domain, a cleavage signal; a signal peptide; and a tumor specific antigen or fragment thereof. Disclosed herein a vector comprising an isolated nucleic acid molecule comprising a nucleic acid sequence encoding a phosphatidylserine-specific CAR comprising an extracellular domain comprising an antigen binding domain, a transmembrane domain, and an intracellular domain comprising one or more immunostimulatory domains. Disclosed herein a vector comprising an isolated nucleic acid molecule comprising a nucleic acid sequence encoding a phosphatidylserine-specific CAR comprising from N-terminus to C-terminus a signal peptide; an antigen binding domain; a hinge domain; a transmembrane domain; and an intracellular domain comprising one or more immunoreceptor tyrosine-based activation domains (ITAMs) and/or one or more co-stimulatory domains. Disclosed herein a vector comprising an isolated nucleic acid molecule comprising a nucleic acid sequence encoding a phosphatidylserine-specific CAR comprising from N-terminus to C-terminus a signal peptide; an antigen binding domain; a hinge domain; a transmembrane domain; an intracellular domain, a cleavage signal; a signal peptide; and a tumor specific antigen or fragment thereof.

[0168] Disclosed herein a vector comprising an isolated nucleic acid molecule comprising a nucleic acid sequence encoding a CAR comprising the sequence set forth in SEQ ID NO:01, SEQ ID NO: 02, or SEQ ID NO:03. Disclosed herein a vector comprising an isolated nucleic acid molecule comprising a nucleic acid sequence encoding a CAR comprising the sequence set forth in SEQ ID NO:05, SEQ ID NO:06, or SEQ ID NO:07. Disclosed herein a vector comprising an isolated nucleic acid molecule comprising a nucleic acid sequence encoding a CAR comprising a sequence having at least 70%, at least 75%, at least 80%, at least 85%, at least 90%, or at least 95% identity to the sequence set forth in SEQ ID NO:01, SEQ ID NO:02, or SEQ ID NO:03. Disclosed herein a vector comprising an isolated nucleic acid molecule comprising a nucleic acid sequence encoding a CAR comprising a sequence having at least 70%, at least 75%, at least 80%, at least 85%, at least 90%, or at least 95% identity to the sequence set forth in SEQ ID NO:05, SEQ ID NO:06, or SEQ ID NO:07.

[0169] Disclosed herein a vector comprising an isolated nucleic acid molecule comprising a nucleic acid sequence encoding a chimeric antigen receptor (CAR), comprising from N-terminus to C-terminus a signal peptide; an antigen binding domain; a hinge domain; a transmembrane domain; and an intracellular domain comprising one or more immunoreceptor tyrosine-based activation domains (ITAMs) and/or one or more co-stimulatory domains. Disclosed herein a vector comprising an isolated nucleic acid molecule comprising a nucleic acid sequence encoding a chimeric antigen receptor (CAR), comprising from N-terminus to C-terminus a signal peptide; an antigen binding domain; a hinge domain; a transmembrane domain; an intracellular domain, a cleavage signal; a signal peptide; and a tumor specific antigen or fragment thereof.

[0170] In an aspect, a disclosed vector can be used to introduce a disclosed isolated nucleic acid molecule or disclosed isolated nucleic acid sequence to one or more host cells. In an aspect, host cells are discussed infra and can comprise T cells, NK cells, macrophages, or iPSCs.

[0171] In an aspect, a disclosed vector can be used to introduce a disclosed isolated nucleic acid molecule encoding a disclosed CAR or disclosed isolated nucleic acid sequence encoding a disclosed CAR to one or more host cells.

[0172] In an aspect, a disclosed vector can be used to introduce a disclosed isolated nucleic acid molecule or disclosed isolated nucleic acid sequence to one or more T cells or NK cells or macrophages. In an aspect, a disclosed vector can be used to introduce a disclosed isolated nucleic acid molecule encoding a disclosed CAR or disclosed isolated nucleic acid sequence encoding a disclosed CAR to one or more T cells or NK cells or macrophages.

[0173] In an aspect, a vector can be an integrating vector or a non-integrating vector. In an aspect, integration can mean that the nucleotides of nucleic acid sequence can be stably inserted into the cellular genome (e.g., covalently linked to the nucleic acid sequence within the cell''s chromosomal DNA).

[0174] In an aspect, a disclosed vector can comprise lipid and/or polymer-based nanoparticles loaded with mRNA encoding a disclosed CAR. In an aspect, a disclosed vector can comprise lipid and/or polymer-based nanoparticles loaded with transposon-based plasmids such as, for example, transposon-based plasmids comprising a sequence encoding a disclosed CAR. In an aspect, a disclosed vector can comprise mRNA encoding a disclosed CAR. In an aspect, a disclosed vector can comprise lipid and/or polymer-based nanoparticles loaded with mRNA encoding a disclosed CAR.

[0175] In an aspect, a disclosed viral vector can be an adenovirus vector, an AAV vector, a herpes simplex virus vector, a retrovirus vector, a lentivirus vector, and alphavirus vector, a flavivirus vector, a rhabdovirus vector, a measles virus vector, a Newcastle disease viral vector, a poxvirus vector, or a picornavirus vector. In an aspect, a disclosed viral vector can be an adeno-associated virus (AAV) vector In an aspect, a disclosed AAV vector can include naturally isolated serotypes including, but not limited to, AAV1, AAV2, AAV3 (including 3a and 3b), AAV4, AAV5, AAV6, AAV7, AAV8, AAVrh8, AAV9, AAV10, AAVrh10, AAV11, AAV12, AAV13, AAVrh39, AAVrh43, AAVcy.7 as well as bovine AAV, caprine AAV, canine AAV, equine AAV, ovine AAV, avian AAV, primate AAV, non-primate AAV, and any other virus classified by the International Committee on Taxonomy of Viruses (ICTV) as an AAV. In an aspect, an AAV capsid can be a chimera either created by capsid evolution or by rational capsid engineering from a naturally isolated AAV variants to capture desirable serotype features such as enhanced or specific tissue tropism and/or a host immune response escape. Naturally isolated AAV variants include, but not limited to, AAV-DJ, AAV-HAE1, AAV-HAE2, AAVM41, AAV-1829, AAV2 Y/F, AAV2 T/V, AAV218, AAV2.5, AAV9.45, AAV9.61, AAV-B1, AAV-AS, AAV9.45A-String (e.g., AAV9.45-AS), AAV9.45Angiopep, AAV9.47-Angiopep, and AAV9.47-AS, AAV-PHP.B, AAV-PHP.eB, AAV-PHP.S, AAV-F, AAVcc.47, and AAVcc.81. In an aspect, a disclosed AAV vector can be AAV-Rh74 or a related variant (e.g., capsid variants like RHM4-1). In an aspect, a disclosed AAV vector can be a self-complementary AAV as disclosed herein.

[0176] In an aspect, a disclosed vector can be a recombinant vector comprising a disclosed nucleic acid sequence. Recombinant vectors (such as recombinant viral vectors) are known to the art.

[0177] In an aspect, a disclosed promoter can comprise a ubiquitous promoter, a constitutive promoter, or a tissue specific promoter. In an aspect, a disclosed promoter can be operably linked to a disclosed nucleic acid sequence encoding a disclosed CAR. In an aspect, a disclosed promoter can be operably linked to a disclosed nucleic acid sequence encoding a disclosed tumor antigen. Promoters are known to the art. In an aspect, a disclosed promoter can be a promoter/enhancer. Promoter/enhancers are known to the art. In an aspect, a disclosed promoter can be an endogenous promoter. In an aspect, a disclosed endogenous promoter can be an endogenous promoter/enhancer. In an aspect, a disclosed promoter or a disclosed promoter/enhancer can be used for constitutive and efficient expression of a disclosed CAR. In an aspect, a disclosed promoter or a disclosed promoter/enhancer can be used for constitutive and efficient expression of a disclosed tumor antigen. In an aspect, a disclosed vector can be used to engineer cells to express a disclosed CAR.

[0178] In an aspect, a disclosed vector can further comprise a nucleic acid encoding a second CAR that is specific for a tumor antigen. In an aspect, a disclosed tumor antigen comprises can comprise HPV-16 E6 and HPV-16 E7, alpha folate receptor, 5T4, avp6 integrin, BCMA, B7-H3, B7-H6, CAIX, CD19, CD20, CD22, CD28, CD30, CD33, CD44, CD44v6, CD44v7/8, CD70, CD79a, CD79b, CD123, CD137 (4-1BB), CD138, CD171, CEA, CSPG4, CLL-1, CS1, EGFR, EGFR family including ErbB2 (HERII), EGFRvIll, EGP2, EGP40, EPCAM, EphA2, EpCAM, FAP, fetal AchR, FRa, Flt3, GD2, GD3, Glypican-3 (GPC3), HLAA1+MAGE1, HLA-A2+MAGE1, HLAA3+MAGE1, HLA-A1+NY-ES0-1, HLA-A2+NY-ES0-1, HLA-A3+NYES0-1, IL-11Ra, IL-13Ra2, Lambda, Lewis-Y, Kappa, Mesothelin, Mud, Muc16, NCAM, NKG2D Ligands, NYE-SO-1, PRAME, PSCA, PSMA, RORI, SSX, Survivin, TACI, TAG72, TEMs, VEGFRII, or any combination thereof.

[0179] In an aspect, a disclosed vector can be a viral vector or a non-viral vector. In an aspect, a disclosed non-viral vector can be a polymer-based vector, a peptide-based vector, a lipid nanoparticle, a solid lipid nanoparticle, or a cationic lipid-based vector.

[0180] In an aspect, a disclosed vector can be a transposon-based vector such as Sleeping Beauty and PiggyBac, both of which are known in the art. In an aspect, a first plasmid can be loaded with a disclosed nucleic acid sequence encoding a disclosed CAR, named transposon, surrounded by inverted repeats (IRs) that contain short direct repeats (DRs), while a second plasmid encodes the enzyme (transposase) that can recognize the sequences from the first plasmid and cut the transposon out of the first plasmid. Then the disclosed CAR sequence can be successfully delivered into the targeted cell (e.g., a T cell or a NK cell or a macrophage) cytoplasm and inserted randomly into TA dinucleotide base pairs of the recipient DNA sequence. In an aspect, using this vector, stable integration and reliable long-term expression of the disclosed CAR sequence can be achieved.

[0181] In an aspect, a disclosed vector can stimulate an effector cell-mediated immune modulator response to PS-expressing tumor cells. In an aspect, a disclosed vector can induce a tumor reducing immune response. In an aspect, a disclosed vector can induce phagocytosis of cancer cells in the subject. In an aspect, a disclosed vector can cross-prime an anti-tumor T cell response. In an aspect, a disclosed vector can induce a tumor eliminating immune response. In an aspect, a disclosed vector can treat cancer. Disclosed herein is a vector construct as represented in FIG. 4.

### 4. Plasmids

[0182] Disclosed herein is a plasmid comprising a disclosed isolated nucleic acid molecule. Disclosed herein is a vector comprising a disclosed nucleic acid sequence. Disclosed herein a plasmid comprising an isolated nucleic acid molecule comprising a nucleic acid sequence encoding any disclosed CAR. Disclosed herein a plasmid comprising an isolated nucleic acid molecule comprising a nucleic acid sequence encoding a CAR specific for phosphatidylserine (PS). Disclosed herein a plasmid comprising an isolated nucleic acid molecule comprising a nucleic acid sequence encoding a CAR comprising an extracellular domain comprising an antigen binding domain, a transmembrane domain, and an intracellular domain comprising one or more immunostimulatory domains. Disclosed herein a plasmid comprising an isolated nucleic acid and an intracellular domain comprising one or more immunoreceptor tyrosine-based activation domains (ITAMs) and/or one or more co-stimulatory domains. Disclosed herein a plasmid comprising an isolated nucleic acid molecule comprising a nucleic acid sequence encoding a CAR comprising from N-terminus to C-terminus a signal peptide; an antigen binding domain; a hinge domain; a transmembrane domain; an intracellular domain, a cleavage signal; a signal peptide; and a tumor specific antigen or fragment thereof. Disclosed herein a plasmid comprising an isolated nucleic acid molecule comprising a nucleic acid sequence encoding a phosphatidylserine-specific CAR comprising an extracellular domain comprising an antigen binding domain, a transmembrane domain, and an intracellular domain comprising one or more immunostimulatory domains. Disclosed herein a plasmid comprising an isolated nucleic acid molecule comprising a nucleic acid sequence encoding a phosphatidylserine-specific CAR comprising from N-terminus to C-terminus a signal peptide; an antigen binding domain; a hinge domain; a transmembrane domain; and an intracellular domain comprising one or more immunoreceptor tyrosine-based activation domains (ITAMs) and/or one or more co-stimulatory domains. Disclosed herein a plasmid comprising an isolated nucleic acid molecule comprising a nucleic acid sequence encoding a phosphatidylserine-specific CAR comprising from N-terminus to C-terminus a signal peptide; an antigen binding domain; a hinge domain; a transmembrane domain; an intracellular domain, a cleavage signal; a signal peptide; and a tumor specific antigen or fragment thereof.

[0183] Disclosed herein a plasmid comprising an isolated nucleic acid molecule comprising a nucleic acid sequence encoding a CAR comprising the sequence set forth in SEQ ID NO:01, SEQ ID NO: 02, or SEQ ID NO:03. Disclosed herein a plasmid comprising an isolated nucleic acid molecule comprising a nucleic acid sequence encoding a CAR comprising the sequence set forth in SEQ ID NO:05, SEQ ID NO:06, or SEQ ID NO:07. Disclosed herein a plasmid comprising an isolated nucleic acid molecule comprising a nucleic acid sequence encoding a CAR comprising a sequence having at least 70%, at least 75%, at least 80%, at least 85%, at least 90%, or at least 95% identity to the sequence set forth in SEQ ID NO:01, SEQ ID NO:02, or SEQ ID NO:03. Disclosed herein a plasmid comprising an isolated nucleic acid molecule comprising a nucleic acid sequence encoding a CAR comprising a sequence having at least 70%, at least 75%, at least 80%, at least 85%, at least 90%, or at least 95% identity to the sequence set forth in SEQ ID NO: 05, SEQ ID NO:06, or SEQ ID NO:07.

[0184] Disclosed herein a plasmid comprising an isolated nucleic acid molecule comprising a nucleic acid sequence encoding a chimeric antigen receptor (CAR), comprising from N-terminus to C-terminus a signal peptide; an antigen binding domain; a hinge domain; a transmembrane domain; and an intracellular domain comprising one or more immunoreceptor tyrosine-based activation domains (ITAMs) and/or one or more co-stimulatory domains. Disclosed herein a plasmid comprising an isolated nucleic acid molecule comprising a nucleic acid sequence encoding a chimeric antigen receptor (CAR), comprising from N-terminus to C-terminus a signal peptide; an antigen binding domain; a hinge domain; a transmembrane domain; an intracellular domain, a cleavage signal; a signal peptide; and a tumor specific antigen or fragment thereof.

[0185] In an aspect, a disclosed plasmid can be used to introduce a disclosed isolated nucleic acid molecule or disclosed isolated nucleic acid sequence to one or more host cells. In an aspect, host cells are discussed infra and can comprise T cells, NK cells, macrophages, or iPSCs.

[0186] In an aspect, a disclosed plasmid can be used to introduce a disclosed isolated nucleic acid molecule encoding a disclosed CAR or disclosed isolated nucleic acid sequence encoding a disclosed CAR to one or more host cells.

[0187] In an aspect, a a disclosed plasmid can be used to introduce a disclosed isolated nucleic acid molecule or disclosed isolated nucleic acid sequence to one or more T cells or NK cells or macrophages. In an aspect, a disclosed plasmid can be used to introduce a disclosed isolated nucleic acid molecule encoding a disclosed CAR or disclosed isolated nucleic acid sequence encoding a disclosed CAR to one or more T cells or NK cells or macrophages.

[0188] In an aspect, a disclosed plasmid can be an integrating vector or a non-integrating vector. In an aspect, integration can mean that the nucleotides of nucleic acid sequence can be stably inserted into the cellular genome (e.g., covalently linked to the nucleic acid sequence within the cell''s chromosomal DNA).

[0189] In an aspect, a disclosed plasmid can be a recombinant vector comprising a disclosed nucleic acid sequence. Recombinant plasmids are known to the art.

[0190] In an aspect, a disclosed promoter can comprise a ubiquitous promoter, a constitutive promoter, or a tissue specific promoter. In an aspect, a disclosed promoter can be operably linked to a disclosed nucleic acid sequence encoding a disclosed CAR. In an aspect, a disclosed promoter can be operably linked to a disclosed nucleic acid sequence encoding a disclosed tumor antigen. Promoters are known to the art. In an aspect, a disclosed promoter can be a promoter/enhancer. Promoter/enhancers are known to the art. In an aspect, a disclosed promoter can be an endogenous promoter. In an aspect, a disclosed endogenous promoter can be an endogenous promoter/enhancer. In an aspect, a disclosed promoter or a disclosed promoter/enhancer can be used for constitutive and efficient expression of a disclosed CAR. In an aspect, a disclosed promoter or a disclosed promoter/enhancer can be used for constitutive and efficient expression of a disclosed tumor antigen. In an aspect, a disclosed plasmid can be used to engineer cells to express a disclosed CAR.

[0191] In an aspect, a disclosed plasmid can further comprise a nucleic acid encoding a second CAR that is specific for a tumor antigen. In an aspect, a disclosed tumor antigen comprises can comprise HPV-16 E6 and HPV-16 E7, alpha folate receptor, 5T4, avp6 integrin, BCMA, B7-H3, B7-H6, CAIX, CD19, CD20, CD22, CD28, CD30, CD33, CD44, CD44v6, CD44v7/8, CD70, CD79a, CD79b, CD123, CD137 (4-1BB), CD138, CD171, CEA, CSPG4, CLL-1, CS1, EGFR, EGFR family including ErbB2 (HERII), EGFRvIll, EGP2, EGP40, EPCAM, EphA2, EpCAM, FAP, fetal AchR, FRa, Flt3, GD2, GD3, Glypican-3 (GPC3), HLAA1+MAGE1, HLA-A2+MAGE1, HLAA3+MAGE1, HLA-A1+NY-ES0-1, HLA-A2+NY-ES0-1, HLA-A3+NYES0-1, IL-11Ra, IL-13Ra2, Lambda, Lewis-Y, Kappa, Mesothelin, Mud, Muc16, NCAM, NKG2D Ligands, NYE-SO-1, PRAME, PSCA, PSMA, RORI, SSX, Survivin, TACI, TAG72, TEMs, VEGFRII, or any combination thereof.

[0192] In an aspect, a disclosed vector can be a viral vector or a non-viral vector. In an aspect, a disclosed non-viral vector can be a polymer-based vector, a peptide-based vector, a lipid nanoparticle, a solid lipid nanoparticle, or a cationic lipid-based vector.

[0193] In an aspect, a disclosed plasmid can comprise a transposons such as, for example, Sleeping Beauty and PiggyBac, both of which are known in the art. In an aspect, a first plasmid can be loaded with a disclosed nucleic acid sequence encoding a disclosed CAR, named transposon, surrounded by inverted repeats (IRs) that contain short direct repeats (DRs), while a second plasmid encodes the enzyme (transposase) that can recognize the sequences from the first plasmid and cut the transposon out of the first plasmid. Then the disclosed CAR sequence can be successfully delivered into the targeted cell (e.g., a T cell or a NK cell or a macrophage) cytoplasm and inserted randomly into TA dinucleotide base pairs of the recipient DNA sequence. In an aspect, using this vector, stable integration and reliable long-term expression of the disclosed CAR sequence can be achieved.

[0194] In an aspect, a disclosed plasmid can stimulate an effector cell mediated immune modulator response to PS-expressing tumor cells. In an aspect, a disclosed plasmid can induce a tumor reducing immune response. In an aspect, a disclosed plasmid can induce phagocytosis of cancer cells in the subject. In an aspect, a disclosed plasmid can cross-prime an anti-tumor T cell response. In an aspect, a disclosed plasmid can induce a tumor eliminating immune response. In an aspect, a disclosed plasmid can treat cancer.

### 5. Cells

[0195] Disclosed herein are cells transformed or transfected by one or more disclosed isolated nucleic acid molecules. Disclosed herein are cells transformed or transfected by an isolated nucleic acid molecule comprising a nucleic acid sequence encoding any disclosed CAR. Disclosed herein are cells transformed or transfected by an isolated nucleic acid molecule comprising a nucleic acid sequence encoding a CAR specific for phosphatidylserine (PS).

[0196] Disclosed herein are cells transformed or transfected by an isolated nucleic acid molecule comprising a nucleic acid sequence encoding a CAR comprising an extracellular domain comprising an antigen binding domain, a transmembrane domain, and an intracellular domain comprising one or more immunostimulatory domains. Disclosed herein are cells transformed or transfected by an isolated nucleic acid molecule comprising a nucleic acid sequence encoding a CAR comprising from N-terminus to C-terminus a signal peptide; an antigen binding domain; a hinge domain; a transmembrane domain; and an intracellular domain comprising one or more immunoreceptor tyrosine-based activation domains (ITAMs) and/or one or more co-stimulatory domains. Disclosed herein are cells transformed or transfected by an isolated nucleic acid molecule comprising a nucleic acid sequence encoding a CAR comprising from N-terminus to C-terminus a signal peptide; an antigen binding domain; a hinge domain; a transmembrane domain; an intracellular domain, a cleavage signal; a signal peptide; and a tumor specific antigen or fragment thereof. Disclosed herein are cells transformed or transfected by an isolated nucleic acid molecule comprising a nucleic acid sequence encoding a phosphatidylserine-specific CAR comprising an extracellular domain comprising an antigen binding domain, a transmembrane domain, and an intracellular domain comprising one or more immunostimulatory domains.

[0197] Disclosed herein are cells transformed or transfected by an isolated nucleic acid molecule comprising a nucleic acid sequence encoding a phosphatidylserine-specific CAR comprising from N-terminus to C-terminus a signal peptide; an antigen binding domain; a hinge domain; a transmembrane domain; and an intracellular domain comprising one or more immunoreceptor tyrosine-based activation domains (ITAMs) and/or one or more co-stimulatory domains. Disclosed herein are cells transformed or transfected by an isolated nucleic acid molecule comprising a nucleic acid sequence encoding a phosphatidylserine-specific CAR comprising from N-terminus to C-terminus a signal peptide; an antigen binding domain; a hinge domain; a transmembrane domain; an intracellular domain, a cleavage signal; a signal peptide; and a tumor specific antigen or fragment thereof.

[0198] Disclosed herein are cells transformed or transfected by an isolated nucleic acid molecule comprising a nucleic acid sequence encoding a CAR comprising the sequence set forth in SEQ ID NO: 01, SEQ ID NO:02, or SEQ ID NO:03. Disclosed herein are cells transformed or transfected by an isolated nucleic acid molecule comprising a nucleic acid sequence encoding a CAR comprising the sequence set forth in SEQ ID NO:05, SEQ ID NO:06, or SEQ ID NO:07.

[0199] Disclosed herein are cells transformed or transfected by an isolated nucleic acid molecule comprising a nucleic acid sequence encoding a CAR comprising a sequence having at least 70%, at least 75%, at least 80%, at least 85%, at least 90%, or at least 95% identity to the sequence set forth in SEQ ID NO:01, SEQ ID NO:02, or SEQ ID NO:03. Disclosed herein are cells transformed or transfected by an isolated nucleic acid molecule comprising a nucleic acid sequence encoding a CAR comprising a sequence having at least 70%, at least 75%, at least 80%, at least 85%, at least 90%, or at least 95% identity to the sequence set forth in SEQ ID NO:05, SEQ ID NO:06, or SEQ ID NO:07.

[0200] Disclosed herein are cells transformed or transfected by an isolated nucleic acid molecule comprising a nucleic acid sequence encoding a chimeric antigen receptor (CAR), comprising from N-terminus to C-terminus a signal peptide; an antigen binding domain; a hinge domain; a transmembrane domain; and an intracellular domain comprising one or more immunoreceptor tyrosine-based activation domains (ITAMs) and/or one or more co-stimulatory domains.

[0201] Disclosed herein are cells transformed or transfected by an isolated nucleic acid molecule comprising a nucleic acid sequence encoding a chimeric antigen receptor (CAR), comprising from N-terminus to C-terminus a signal peptide; an antigen binding domain; a hinge domain; a transmembrane domain; an intracellular domain, a cleavage signal; a signal peptide; and a tumor specific antigen or fragment thereof. Disclosed herein are cells transduced by one or more disclosed viral vectors.

[0202] Disclosed herein are cells transduced by a vector comprising a disclosed isolated nucleic acid molecule. Disclosed herein are cells transduced by a vector comprising a disclosed nucleic acid sequence. Disclosed herein are cells transduced by a vector comprising an isolated nucleic acid molecule comprising a nucleic acid sequence encoding any disclosed CAR. Disclosed herein are cells transduced by a vector comprising an isolated nucleic acid molecule comprising a nucleic acid sequence encoding a CAR specific for phosphatidylserine (PS).

[0203] Disclosed herein are cells transduced by a vector comprising an isolated nucleic acid molecule comprising a nucleic acid sequence encoding a CAR comprising an extracellular domain comprising an antigen binding domain, a transmembrane domain, and an intracellular domain comprising one or more immunostimulatory domains. Disclosed herein are cells transduced by a vector comprising an isolated nucleic acid molecule comprising a nucleic acid sequence encoding a CAR comprising from N-terminus to C-terminus a signal peptide; an antigen binding domain; a hinge domain; a transmembrane domain; and an intracellular domain comprising one or more immunoreceptor tyrosine-based activation domains (ITAMs) and/or one or more co-stimulatory domains. Disclosed herein are cells transduced by a vector comprising an isolated nucleic acid molecule comprising a nucleic acid sequence encoding a CAR comprising from N-terminus to C-terminus a signal peptide; an antigen binding domain; a hinge domain; a transmembrane domain; an intracellular domain, a cleavage signal; a signal peptide; and a tumor specific antigen or fragment thereof. Disclosed herein are cells transduced by a vector comprising an isolated nucleic acid molecule comprising a nucleic acid sequence encoding a phosphatidylserine-specific CAR comprising an extracellular domain comprising an antigen binding domain, a transmembrane domain, and an intracellular domain comprising one or more immunostimulatory domains. Disclosed herein are cells transduced by a vector comprising an isolated nucleic acid molecule comprising a nucleic acid sequence encoding a phosphatidylserine-specific CAR comprising from N-terminus to C-terminus a signal peptide; an antigen binding domain; a hinge domain; a transmembrane domain; and an intracellular domain comprising one or more immunoreceptor tyrosine-based activation domains (ITAMs) and/or one or more co-stimulatory domains. Disclosed herein are cells transduced by a vector comprising an isolated nucleic acid molecule comprising a nucleic acid sequence encoding a phosphatidylserine-specific CAR comprising from N-terminus to C-terminus a signal peptide; an antigen binding domain; a hinge domain; a transmembrane domain; an intracellular domain, a cleavage signal; a signal peptide; and a tumor specific antigen or fragment thereof.

[0204] Disclosed herein are cells transduced by a vector comprising an isolated nucleic acid molecule comprising a nucleic acid sequence encoding a CAR comprising the sequence set forth in SEQ ID NO:01, SEQ ID NO:02, or SEQ ID NO:03. Disclosed herein are cells transduced by a vector comprising an isolated nucleic acid molecule comprising a nucleic acid sequence encoding a CAR comprising the sequence set forth in SEQ ID NO:05, SEQ ID NO:06, or SEQ ID NO: 07. Disclosed herein are cells transduced by a vector comprising an isolated nucleic acid molecule comprising a nucleic acid sequence encoding a CAR comprising a sequence having at least 70%, at least 75%, at least 80%, at least 85%, at least 90%, or at least 95% identity to the sequence set forth in SEQ ID NO:01, SEQ ID NO:02, or SEQ ID NO:03. Disclosed herein are cells transduced by a vector comprising an isolated nucleic acid molecule comprising a nucleic acid sequence encoding a CAR comprising a sequence having at least 70%, at least 75%, at least 80%, at least 85%, at least 90%, or at least 95% identity to the sequence set forth in SEQ ID NO: 05, SEQ ID NO:06, or SEQ ID NO:07.

[0205] Disclosed herein are cells transduced by a vector comprising an isolated nucleic acid molecule comprising a nucleic acid sequence encoding a chimeric antigen receptor (CAR), comprising from N-terminus to C-terminus a signal peptide; an antigen binding domain; a hinge domain; a transmembrane domain; and an intracellular domain comprising one or more immunoreceptor tyrosine-based activation domains (ITAMs) and/or one or more co-stimulatory domains. Disclosed herein are cells transduced by a vector comprising an isolated nucleic acid molecule comprising a nucleic acid sequence encoding a chimeric antigen receptor (CAR), comprising from N-terminus to C-terminus a signal peptide; an antigen binding domain; a hinge domain; a transmembrane domain; an intracellular domain, a cleavage signal; a signal peptide; and a tumor specific antigen or fragment thereof.

[0206] Disclosed herein is a cell expressing an anti-phosphatidylserine (PS) chimeric antigen receptor (CAR), wherein anti-PS CAR comprises a disclosed CAR. Disclosed herein is a cell expressing a chimeric antigen receptor (CAR), wherein the CAR comprises an anti-PS binding domain, wherein the bind domain comprises Annexin A1 (ANXA1) or the PS-binding core domain, Annexin A2 (ANXA1), Annexin A3 (ANXA1), Annexin A4 (ANXA1), Annexin A5 (ANXA1), Annexin A6 (ANXA1), Annexin A7 (ANXA1), Annexin A8 (ANXA1), Annexin A8 Like 1 (ANXA1), Annexin A9 (ANXA1), Annexin A10 (ANXA1), Annexin A11 (ANXA1), Annexin A13 (ANXA1), Adhesion G Protein Coupled Receptor B1 (ADGRB1) or the extracellular domain thereof, Apolipoprotein H (APO-H), Coagulation Factor II (F2), Coagulation Factor VII (F7), Coagulation Factor IX (F9), Coagulation Factor X (F10), Growth Arrest Specific 6 (CAS6), Milk Fat Globule EGF And Factor V/VIII Domain Containing (MFGE8), Advanced Glycosylation End-Product Specific Receptor (AGER) or the extracellular domain thereof, Jumonji Domain-Containing Protein 6 (JMJD6); Protein S (PROS1), Hepatitis A Virus Cellular Receptor 1 (HAVCR1) or the extracellular domain thereof, Hepatitis A Virus Cellular Receptor 2 (HAVCR2) or the extracellular domain thereof, T Cell Immunoglobulin and Mucin Domain Containing (TIM-3) or the extracellular domain thereof, Protein Kinase C Alpha (PRKCA) or the C2 domain thereof, Synaptotagmin (SYT1) or the C2A domain thereof, Stabilin-1 (STAB1) or the extracellular domain thereof, Stabilin-2 (STAB2) or the extracellular domain thereof, or any combination thereof.

[0207] In an aspect, a disclosed cell can be transformed or transfected by an isolated nucleic acid molecule comprising a nucleic acid sequence encoding a tumor antigen. In an aspect, a disclosed cell can be transduced by a vector comprising an isolated nucleic acid molecule comprising a nucleic acid sequence encoding a tumor antigen. In an aspect, following transformation, transfection, and/or transduction, a disclosed cell can express a disclosed CAR and/or a disclosed tumor antigen.

[0208] In an aspect, disclosed cells can comprise T cells or NK cells or macrophages. In an aspect, disclosed cells are immune cells. In an aspect, disclosed cells can comprise T cells, B cells, natural killer (NK) cells, dendritic cells, granulocytes, innate lymphoid cells, megakaryocytes, monocytes, macrophages, platelets, thymocytes, myeloid cells, or any combination thereof. In an aspect, disclosed T cells and NK cells can be differentiated in vitro from a hematopoietic stem cell population (for example iPSCs) or can be obtained from a subject. In an aspect, T cells and NK cells can be obtained from, for example, peripheral blood mononuclear cells (PBMCs), bone marrow, lymph node tissue, cord blood, thymus tissue, tissue from a site of infection, ascites, pleural effusion, spleen tissue, tumors, or any combination thereof. In an aspect, disclosed T cells can be derived from one or more T cell lines available in the art. In an aspect, disclosed T cells can also be obtained from a unit of blood collected from a subject using any number of techniques known to the skilled person.

[0209] In an aspect, following transformation, transfection, and/or transduction, disclosed host cells expressing a disclosed CAR and/or a disclosed tumor antigen can be administered to a subject. In an aspect, the transformed, transfected, and/or transduced, disclosed host cells expressing a disclosed CAR and/or a disclosed tumor antigen can be autologous to the receiving subject.

[0210] In an aspect, a disclosed cell can stimulate an effector cell-mediated immune modulator response to PS-expressing tumor cells. In an aspect, a disclosed cell can induce a tumor-reducing immune response. In an aspect, a disclosed cell can induce phagocytosis of cancer cells in the subject. In an aspect, a disclosed cell can cross-prime an anti-tumor T cell response. In an aspect, a disclosed cell can induce a tumor-eliminating immune response. In an aspect, a disclosed cell can treat cancer.

[0211] In an aspect, a therapeutically effective amount of the disclosed genetically modified cells expressing a disclosed chimeric antigen receptor targeting phosphatidylserine (PS) (e.g., T cells, NK cells, and/or macrophages) can be about 1×10⁴ to about 1×10⁹ cells/kg per subject. In an aspect, a therapeutically effective amount of the disclosed genetically modified cells expressing a disclosed chimeric antigen receptor targeting phosphatidylserine (PS) (e.g., T cells, NK cells, and/or macrophages) can be about 1×10⁵ cells/kg per subject, about 1×10⁶ cells/kg per subject, about 1×10⁷ cells/kg per subject, about 1×10⁸ cells/kg per subject, or about 1×10⁹ cells/kg per subject.

### 6. Pharmaceutical Formulations

[0212] Disclosed herein is a pharmaceutical formulation comprising a disclosed isolated nucleic acid molecule; and one or more pharmaceutically acceptable carriers. Disclosed herein is a pharmaceutical formulation comprising a disclosed vector; and one or more pharmaceutically acceptable carriers. Disclosed herein is a pharmaceutical formulation comprising a disclosed plasmid; and one or more pharmaceutically acceptable carriers. Disclosed herein is a pharmaceutical formulation comprising a disclosed cell; and one or more pharmaceutically acceptable carriers.

[0213] Disclosed herein is a pharmaceutical formulation comprising an isolated nucleic acid molecule comprising a nucleic acid sequence encoding any disclosed CAR. Disclosed herein is an isolated nucleic acid molecule comprising a nucleic acid sequence encoding a CAR specific for phosphatidylserine (PS). Disclosed herein is a pharmaceutical formulation an isolated nucleic acid molecule comprising a nucleic acid sequence encoding a CAR comprising an extracellular domain comprising an antigen binding domain, a transmembrane domain, and an intracellular domain comprising one or more immunostimulatory domains.

[0214] Disclosed herein is a pharmaceutical formulation comprising a vector comprising a disclosed nucleic acid sequence. Disclosed herein is a pharmaceutical formulation comprising a vector comprising an isolated nucleic acid molecule comprising a nucleic acid sequence encoding any disclosed CAR. Disclosed herein a vector comprising an isolated nucleic acid molecule comprising a nucleic acid sequence encoding a CAR specific for phosphatidylserine (PS).

[0215] Disclosed herein is a pharmaceutical formulation comprising a plasmid comprising a disclosed isolated nucleic acid molecule. Disclosed herein is a pharmaceutical formulation comprising a plasmid comprising a disclosed nucleic acid sequence. Disclosed herein is a pharmaceutical formulation comprising a plasmid comprising an isolated nucleic acid molecule comprising a nucleic acid sequence encoding any disclosed CAR. Disclosed herein is a pharmaceutical formulation comprising a plasmid comprising an isolated nucleic acid molecule comprising a nucleic acid sequence encoding a CAR specific for phosphatidylserine (PS). Disclosed herein is a pharmaceutical formulation comprising a plasmid comprising an isolated nucleic acid molecule comprising a nucleic acid sequence encoding a CAR comprising an extracellular domain comprising an antigen binding domain, a transmembrane domain, and an intracellular domain comprising one or more immunostimulatory domains.

[0216] In an aspect, a disclosed pharmaceutical formulation can comprise (i) one or more active agents, (ii) biologically active agents, (iii) one or more pharmaceutically active agents, (iv) one or more immune-based therapeutic agents, (v) one or more clinically approved agents, or (vi) a combination thereof.

[0217] In an aspect, a disclosed pharmaceutical formulation can further comprise one or more anti-inflammatory agents. Anti-inflammatory agents or drugs include, but are not limited to, steroids and glucocorticoids (including betamethasone, budesonide, dexamethasone, hydrocortisone acetate, hydrocortisone, hydrocortisone, methylprednisolone, prednisolone, prednisone, triamcinolone), nonsteroidal anti-inflammatory drugs (NSAIDS) including aspirin, ibuprofen, naproxen, methotrexate, sulfasalazine, leflunomide, anti-TNF medications, cyclophosphamide and mycophenolate.

[0218] In an aspect, NSAIDs can comprise ibuprofen, naproxen, naproxen sodium, Cox-2 inhibitors such as rofecoxib and celecoxib, sialylates, or any combination thereof. In an aspect, analgesics can comprise acetaminophen, oxycodone, tramadol, proporxyphene hydrochloride, or any combination thereof. In an aspect, glucocorticoids can comprise cortisone, dexamethasone, hydrocortisone, methylprednisolone, prednisolone, prednisone, or any combination thereof. Exemplary biological response modifiers include molecules directed against cell surface markers (e.g., CD4, CD5, etc.), cytokine inhibitors, such as the TNF antagonists (e.g., etanercept, adalimumab, and infliximab, chemokine inhibitors and adhesion molecule inhibitors. In an aspect, biological response modifiers can comprise monoclonal antibodies as well as recombinant forms of molecules. In an aspect, exemplary disease-modifying anti-rheumatic drugs (DMARDs) can comprise include azathioprine, cyclophosphamide, cyclosporine, methotrexate, penicillamine, leflunomide, sulfasalazine, hydroxychloroquine, Gold (oral (auranofin) and intramuscular), minocycline, or any combination thereof.

[0219] In an aspect, a disclosed chemotherapeutic agent in a disclosed pharmaceutical formulation can comprise an anthracycline, a vinca alkaloid, an alkylating agent, an immune cell antibody, an antimetabolite, a TNFR glucocorticoid induced TNFR related protein (GITR) agonist, a proteasome inhibitor, an immunomodulator, or any combination thereof. In an aspect, a disclosed chemotherapeutic agent can comprise 5-fluorouracil (Adrucil, Efudex), 6-mercaptopurine (Purinethol), 6-thioguanine, aclarubicin or aclacinomycin A, alemtuzamab (Lemtrada), anastrozole (Arimidex), bicalutamide (Casodex), bleomycin sulfate (Blenoxane), bortezomib (Velcade), busulfan (Myleran), busulfan injection (Busulfex), capecitabine (Xeloda), carboplatin (Paraplatin), carmustine (BiCNU), chlorambucil (Leukeran), cisplatin (Platinol), cladribine (Leustatin), Cosmegan, cyclophosphamide (Cytoxan or Neosar), cyclophosphamide, cytarabine liposome injection (DepoCyt), cytarabine, cytosine arabinoside (Cytosar-U), dacarbazine (DTIC-Dome), dactinomycin (Cosmegen), daunorubicin citrate liposome injection (DaunoXome), daunorubicin hydrochloride (Cerubidine), dexamethasone, docetaxel (Taxotere), doxorubicin hydrochloride (Adriamycin, Rubex), etoposide (Vepesid), fludarabine phosphate (Fludara), flutamide (Eulexin), folic acid antagonists, gemcitabine (difluorodeoxycitidine), gemtuzumab, gliotoxin, hydroxyurea (Hydrea), Idarubicin (Idamycin), ifosfamide (IFEX), ifosfamide, irinotecan (Camptosar), L-asparaginase (ELSPAR), lenalidomide), leucovorin calcium, melphalan (Alkeran), melphalan, methotrexate (Folex), mitoxantrone (Novantrone), mylotarg, N4-pentoxycarbonyl-5 deoxy-5-fluorocytidine, nab-paclitaxel (Abraxane), paclitaxel (Taxol), pentostatin, phoenix (Yttrium90/MX-DTPA), polifeprosan 20 with carmustine implant (Gliadel), purine analogs and adenosine deaminase inhibitors (fludarabine), pyrimidine analogs, rituximab, tamoxifen citrate (Nolvadex), temozolomide), teniposide (Vumon), tezacitibine, thalidomide or a thalidomide derivative, thiotepa, tirapazamine (Tirazone), topotecan hydrochloride for injection (Hycamptin), tositumomab), vinblastine (Velban), vinblastine, vincristine (Oncovin), vindesine, vinorelbine (Navelbine), or any combination thereof.

[0220] In an aspect, a disclosed pharmaceutical formulation can comprise an anti-chemokine therapy that enhances the resident memory T cell formations in tumor-free tissues. In an aspect, a disclosed anti-chemokine therapy can comprise one or more antibodies against CCL1, CCL2, CCL4, CCL17, CCL19, CCL21, CCL22, CCL25, CXCL9, CXCL10, CXCL11, CXCL12, CXCL13, CCR2, CCR5, CCR7, CCR8, CCR9, CXCR3, CXCR4, CXCR5, CX3CL1, CX3CR1, or any combination thereof.

[0221] In an aspect, a disclosed pharmaceutical formulation can further comprise abagovomab, adecatumumab, afutuzumab, alemtuzumab, altumomab, amatuximab, anatumomab, arcitumomabm bavituximab, bectumomab, bevacizumab, bivatuzumab, blinatumomab, brentuximab, cantuzumab, catumaxomab, cetuximab, citatuzumab, cixutumumab, clivatuzumab, conatumumab, daratumumab, drozitumab, duligotumab, dusigitumab, detumomab, dacetuzumab, dalotuzumab, ecromeximab, elotuzumab, ensituximab, ertumaxomab, etaracizumab, farietuzumab, ficlatuzumab, figitumumab, flanvotumab, futuximab, ganitumab, gemtuzumab, girentuximab, glembatumumab, ibritumomab, igovomab, imgatuzumab, indatuximab, inotuzumab, intetumumab, ipilimumab, iratumumab, labetuzumab, lexatumumab, lintuzumab, lorvotuzumab, lucatumumab, mapatumumab, matuzumab, milatuzumab, minretumomab, mitumomab, moxetumomab, namatumab, naptumomab, necitumumab, nimotuzumab, nofetumomab, ocaratuzumab, ofatumumab, olaratumab, onartuzumab, oportuzumab, oregovomab, panitumumab, parsatuzumab, patritumab, pemtumomab, pertuzumab, pintumomab, pritumumab, racotumomab, radretumab, rilotumumab, rituximab, robatumumab, satumomab, sibrotuzumab, siltuximab, simtuzumab, solitomab, tacatuzumab, taplitumomab, tenatumomab, teprotumumab, tigatuzumab, tositumomab, trastuzumab, tucotuzumab, ublituximab, veltuzumab, vorsetuzumab, votumumab, zalutumumab, CC49, 3F8, or any combination thereof.

[0222] In an aspect, a disclosed pharmaceutical formulation can stimulate an effector cell mediated immune response to PS-expressing tumor cells. In an aspect, a disclosed pharmaceutical formulation can restore one or more aspects of cellular homeostasis and/or cellular functionality and/or metabolic dysregulation in a subject having cancer. In an aspect, metabolic dysregulation can be associated with cancer or cancerous cells. In an aspect, following administration of a disclosed pharmaceutical formulation, cell death of PS-expressing cancer cells is effected.

[0223] In an aspect, a disclosed pharmaceutical formulation can be prepared for systemic or direct administration. In an aspect, a disclosed pharmaceutical formulation can be prepared for oral administration, intravenous administration, intratumoral administration, intraperitoneal administration, or any combination thereof. In an aspect, a disclosed pharmaceutical formulation can be prepared for any method of administration disclosed herein. In an aspect, a disclosed pharmaceutical formulation can be prepared for administration via multiple routes either concurrently or sequentially. For example, in an aspect, a disclosed pharmaceutical formulation can be first administered intratumorally and then be administered intravenously. In an aspect, a disclosed pharmaceutical formulation can be first administered intratumorally and then be administered orally. A skilled clinical can determine the best route of administration for a subject at a given time.

[0224] In an aspect, a disclosed pharmaceutical formulation can comprise one or more immune modulators. In an aspect, a disclosed pharmaceutical formulation can comprise one or more proteasome inhibitors. In an aspect, a disclosed pharmaceutical formulation can comprise one or more immunosuppressives or immunosuppressive agents. In an aspect, an immunosuppressive agent can be anti-thymocyte globulin (ATG), cyclosporine (CSP), mycophenolate mofetil (MMF), or a combination thereof. In an aspect, a disclosed pharmaceutical formulation can comprise an anaplerotic agent (such as, for example, C7 compounds like triheptanoin or MCT).

[0225] In an aspect, a disclosed pharmaceutical formulation can comprise an RNA therapeutic. An RNA therapeutic can comprise RNA-mediated interference (RNAi) and/or antisense oligonucleotides (ASO). In an aspect, a disclosed RNA therapeutic can be directed at any protein or enzyme that is overexpressed or is overactive due to a missing, deficient, and/or mutant protein or enzyme (such as, for example, a missing, deficient, and/or mutant protein or enzyme related to cancer and/or associated with cancerous cells). In an aspect, a disclosed RNA therapeutic can be directed at any protein or enzyme that is overexpressed or is overactive and related to cancer and/or associated with cancerous cells.

[0226] In an aspect, a disclosed pharmaceutically acceptable carrier can comprise any disclosed carrier and/or any disclosed excipient.

[0227] In an aspect, a disclosed pharmaceutical formulation can stimulate an effector cell mediated immune modulator response to PS-expressing tumor cells. In an aspect, a disclosed pharmaceutical formulation can induce a tumor reducing immune response. In an aspect, a disclosed pharmaceutical formulation can induce phagocytosis of cancer cells in the subject. In an aspect, a disclosed pharmaceutical formulation can cross-prime an anti-tumor T cell response. In an aspect a disclosed pharmaceutical formulation can induce a tumor eliminating immune response. In an aspect, a disclosed pharmaceutical formulation can treat cancer.

### 7. Animals

[0228] Disclosed herein are animals used to validate the efficacy and/or safety of one or more disclosed CARs, one or more disclosed cells, one or more disclosed isolated nucleic acid molecules, one or more disclosed vectors, one or more disclosed pharmaceutical formulations, or any combination thereof. In an aspect, a disclosed animal can be treated with one or more disclosed CARs, one or more disclosed cells, one or more disclosed isolated nucleic acid molecules, one or more disclosed vectors, one or more disclosed pharmaceutical formulations, or any combination thereof. In an aspect, animals can be assessed and/or monitored for one or more biological and/or chemical functions prior to treatment, during treatment, after treatment, or any combination thereof. In an aspect, a disclosed treated subject can be a mouse or a rat. In an aspect, a disclosed treated subject can be a transgenic mouse or a transgenic rat. In an aspect, a disclosed treated subject can have one or more types of cancers and/or tumors.

### E. Methods of Treating Cancer

[0229] Disclosed herein is a method of treating cancer, the method comprising treating a subject in need thereof by administering to the subject in need thereof a therapeutically effective amount of one or more cells transduced with a disclosed recombinant vector or a pharmaceutical formulation thereof, wherein the one or more cells express a CAR. Disclosed herein is a method of treating cancer, the method comprising treating a subject in need thereof by administering to the subject in need thereof a therapeutically effective amount of one or more cells transformed with a disclosed plasmid or a pharmaceutical formulation thereof, wherein the one or more cells express a CAR. Disclosed herein is a method of treating cancer, the method comprising treating a subject in need thereof by administering to the subject in need thereof a therapeutically effective amount of one or more genetically modified cells expressing a chimeric antigen receptor targeting phosphatidylserine (PS) or a pharmaceutical formulation thereof. Disclosed herein is a method of treating cancer, the method comprising treating a subject in need thereof by administering to the subject in need thereof a therapeutically effective amount of one or more immune cells transduced with a recombinant vector or a pharmaceutical formulation thereof, wherein the one or more cells express a CAR. Disclosed herein is a method of treating cancer, the method comprising treating a subject in need thereof by administering to the subject in need thereof a therapeutically effective amount of one or more immune cells transformed with a disclosed plasmid or a pharmaceutical formulation thereof, wherein the one or more cells express a CAR. Disclosed herein is a method of treating cancer, the method comprising treating a subject in need thereof by administering to the subject in need thereof a therapeutically effective amount of one or more cells expressing a chimeric antigen receptor targeting phosphatidylserine (PS) or a pharmaceutical formulation thereof. Disclosed herein is a method of treating cancer, the method comprising treating a subject in need thereof by administering to the subject in need thereof a therapeutically effective amount of one or more cells expressing a chimeric antigen receptor targeting phosphatidylserine-expressing tumor cells or a pharmaceutical formulation thereof.

[0230] In an aspect, wherein the CAR targets phosphatidylserine (PS)-expressing cancer cells.

[0231] In an aspect, disclosed PS-expressing cancer cells can be in a tumor. In an aspect, disclosed PS-expressing cancer cells can be in one or more tumors. In an aspect, disclosed cancer cells can be blood borne.

[0232] In an aspect, a disclosed method of treating cancer can comprise stimulating an effector cell mediated immune modulator response to PS-expressing tumor cells. In an aspect, a disclosed method of treating cancer can induce a tumor reducing immune response. In an aspect, a disclosed method of treating cancer can induce phagocytosis of cancer cells in the subject. In an aspect, a disclosed method of treating cancer can cross-primer an anti-tumor T cell response. In an aspect, a disclosed method of treating cancer can induce a tumor eliminating immune response. In an aspect, a disclosed method of treating cancer can effect tumor cell death.

[0233] In an aspect, a disclosed method of treating cancer can comprise transducing extracted T cells or NK cells or macrophages ex vivo with a disclosed vector or a disclosed nucleic acid molecule such that the T cells, NK cells, or macrophages express a disclosed CAR, and returning the CAR-expressing T cells, NK cells, or macrophages back to the subject.

[0234] In an aspect, the cells can be autologous to the subject.

[0235] In an aspect, cancer cells can comprise ovarian cancer, ovarian adenocarcinoma, ovarian teratocarcinoma, lung cancer, small cell lung cancer (SCLC), non-small cell lung cancer (NSCLC), squamous cell lung carcinoma, adenocarcinoma, gastric cancer, breast cancer, hepatic cancer, pancreatic cancer, skin cancer, in particular basal cell carcinoma and squamous cell carcinoma, malignant melanoma, head and neck cancer, malignant pleomorphic adenoma, sarcoma, synovial sarcoma, carcinosarcoma, bile duct cancer, bladder cancer, transitional cell carcinoma, papillary carcinoma, kidney cancer, renal cell carcinoma, clear cell renal cell carcinoma, papillary renal cell carcinoma, colon cancer, small bowel cancer, small bowel adenocarcinoma, adenocarcinoma of the ileum, testicular embryonal carcinoma, placental choriocarcinoma, cervical cancer, testicular cancer, testicular seminoma, testicular teratoma, embryonic testicular cancer, uterine cancer, teratocarcinoma, embryonal carcinoma, or any combination thereof.

[0236] Thus, in an aspect, a subject can have, be diagnosed with, or be suspected of having ovarian cancer, ovarian adenocarcinoma, ovarian teratocarcinoma, lung cancer, small cell lung cancer (SCLC), non-small cell lung cancer (NSCLC), squamous cell lung carcinoma, adenocarcinoma, gastric cancer, breast cancer, hepatic cancer, pancreatic cancer, skin cancer, in particular basal cell carcinoma and squamous cell carcinoma, malignant melanoma, head and neck cancer, malignant pleomorphic adenoma, sarcoma, synovial sarcoma, carcinosarcoma, bile duct cancer, bladder cancer, transitional cell carcinoma, papillary carcinoma, kidney cancer, renal cell carcinoma, clear cell renal cell carcinoma, papillary renal cell carcinoma, colon cancer, small bowel cancer, small bowel adenocarcinoma, adenocarcinoma of the ileum, testicular embryonal carcinoma, placental choriocarcinoma, cervical cancer, testicular cancer, testicular seminoma, testicular teratoma, embryonic testicular cancer, uterine cancer, teratocarcinoma, embryonal carcinoma, or any combination thereof.

[0237] In an aspect, a disclosed method of treating cancer can further comprise collecting one or more blood and/or biological samples from a subject at the same time or at different times. For example, in an aspect, a blood sample and/or a biological sample can be collected from a subject at a pre-determined interval. In an aspect, a pre-determined interval can be once a week, once every 2 weeks, once every 3 weeks, once every 4 weeks, once every 5 weeks, once every 6 weeks, once every 7 weeks, once every 8 weeks, or at a longer interval. In an aspect, a pre-determined interval can be once a month, once every 2 months, once every 3 months, once every 5 months, once every 5 months, once every 6 months, or at a longer interval. In an aspect, a blood sample and/or a biological sample can be collected from a subject prior to treatment, during treatment, after treatment, or any combination thereof. In an aspect, a blood and/or a biological sample can be collected from a subject at any time deemed medically and/or clinically appropriate by the skilled clinician.

[0238] In an aspect, a disclosed method of treating cancer can further comprise isolating monocytes from peripheral blood monocular cells in the subject''s blood and/or biological sample. In an aspect, a disclosed method of treating cancer can further comprise isolating bone marrow derived monocytes from the subject''s blood and/or biological sample. In an aspect, a disclosed method of treating cancer can further comprise isolating monocytes from the subject''s blood and/or biological sample. In an aspect, a disclosed method of treating cancer can further comprise isolating naïve macrophages (M0) from the subject''s blood and/or biological sample. In an aspect, a disclosed method of treating cancer can further comprise subjecting a disclosed blood sample to centrifugation. In an aspect, a disclosed method can further comprise separating the blood and/or biological sample into its component parts using, for example, centrifugation, apheresis, or any technique to the skilled person. In an aspect, a disclosed separating step can comprise generating a layer of clear fluid, a layer of red fluid, and a thin layer in between the clear fluid layer and the red fluid layer. In an aspect, a disclosed red layer can comprise red blood cells. In an aspect, a disclosed clear layer can comprise plasma. In an aspect, a disclosed thin layer in between the red layer and the clear layer can comprise the buffy coat. In an aspect, a disclosed buffy coat can comprise white blood cells and platelets. In an aspect, a disclosed method can further comprise isolating peripheral blood mononuclear cells (PMBCs) from the buffy coat. In an aspect, PMBCs can comprise lymphocytes, leukocytes, and/or monocytes. In an aspect, macrophages can be derived from monocytes. In an aspect, isolating lymphocytes, leukocytes, and/or monocytes can be done by any method and/or technique known to the skilled person (e.g., leukapheresis).

[0239] In an aspect, a disclosed method of treating cancer can further comprise isolating resting or M0 macrophages from the buffy coat. In an aspect, a disclosed method of treating cancer can further comprise differentiating monocytes into resting or M0 macrophages. In an aspect of a disclosed method of treating cancer, the disclosed macrophages can be resting or M0 macrophages. In an aspect, a disclosed method of treating cancer can further comprise polarizing the resting or M0 macrophages into a M1 phenotype or a M2 phenotype or a pro-inflammatory phenotype or an anti-inflammatory phenotype. In an aspect, a disclosed method of treating cancer can further comprise polarizing the resting or M0 macrophages into a classically activated macrophage phenotype.

[0240] In an aspect, a therapeutically effective amount or effective dose or effective amount or therapeutically effective dosage of disclosed engineered T cells or NK cells or macrophages can be any amount that, when used alone or in combination with another therapeutic agent, can attack and destroy PS-expressing tumor cells. In an aspect, a therapeutically effective amount or effective dose or effective amount or therapeutically effective dosage of the disclosed genetically modified cells expressing a chimeric antigen receptor targeting phosphatidylserine (PS) or a pharmaceutical formulation thereof or the disclosed engineered T cells or NK cells or macrophages expressing a chimeric antigen receptor targeting phosphatidylserine (PS) or a pharmaceutical formulation thereof can be any amount that, when used alone or in combination with another therapeutic agent, can attack and destroy PS-expressing tumor cells.

[0241] In an aspect, a therapeutically effective amount of the disclosed genetically modified cells expressing a disclosed chimeric antigen receptor targeting phosphatidylserine (PS) (e.g., T cells, NK cells, and/or macrophages) can be about 1×10⁴ to about 1×10⁹ cells/kg per subject. In an aspect, a therapeutically effective amount of the disclosed genetically modified cells expressing a disclosed chimeric antigen receptor targeting phosphatidylserine (PS) (e.g., T cells, NK cells, and/or macrophages) can be about 1×10⁵ cells/kg per subject, about 1×10⁶ cells/kg per subject, about 1×10⁷ cells/kg per subject, about 1×10⁸ cells/kg per subject, or about 1×10⁹ cells/kg per subject.

[0242] In an aspect, a therapeutically effective amount or effective dose or effective amount or therapeutically effective dosage of the disclosed genetically modified cells expressing a chimeric antigen receptor targeting phosphatidylserine (PS) or a pharmaceutical formulation thereof or the disclosed engineered T cells or NK cells or macrophages expressing a chimeric antigen receptor targeting phosphatidylserine (PS) or a pharmaceutical formulation thereof can protect a subject against the onset of a disease and/or promotes disease regression evidenced by a decrease in severity of disease symptoms, an increase in frequency and duration of disease symptom-free periods, or a prevention of impairment or disability due to the disease affliction. The ability of a therapeutic agent to promote disease regression can be evaluated using a variety of methods known to the skilled practitioner, such as in human subjects during clinical trials, in animal model systems predictive of efficacy in humans, or by assaying the activity of the agent in in vitro assays.

[0243] In an aspect, administering genetically modified cells expressing a chimeric antigen receptor targeting phosphatidylserine (PS) or a pharmaceutical formulation thereof or administering engineered T cells or NK cells or macrophages expressing a chimeric antigen receptor targeting phosphatidylserine (PS) or a pharmaceutical formulation thereof can comprise systemic or direct administration. In an aspect, administering can comprise oral administration, intravenous administration, intratumoral administration, intraperitoneal administration, or any combination thereof. In an aspect, administering genetically modified cells expressing a chimeric antigen receptor targeting phosphatidylserine (PS) or a pharmaceutical formulation thereof or administering engineered T cells or NK cells or macrophages expressing a chimeric antigen receptor targeting phosphatidylserine (PS) or a pharmaceutical formulation thereof can be administered by any method of administration disclosed herein. In an aspect, genetically modified cells expressing a chimeric antigen receptor targeting phosphatidylserine (PS) or a pharmaceutical formulation thereof or engineered T cells or NK cells or macrophages expressing a chimeric antigen receptor targeting phosphatidylserine (PS) or a pharmaceutical formulation thereof can be administered via multiple routes either concurrently or sequentially.

[0244] For example, in an aspect, genetically modified cells expressing a chimeric antigen receptor targeting phosphatidylserine (PS) or a pharmaceutical formulation thereof or engineered T cells or NK cells or macrophages expressing a chimeric antigen receptor targeting phosphatidylserine (PS) or a pharmaceutical formulation thereof can be first administered intratumorally and then be administered intravenously. In an aspect, genetically modified cells expressing a chimeric antigen receptor targeting phosphatidylserine (PS) or a pharmaceutical formulation thereof or engineered T cells or NK cells or macrophages expressing a chimeric antigen receptor targeting phosphatidylserine (PS) or a pharmaceutical formulation thereof can be first administered intratumorally and then be administered orally. A skilled clinician can determine the best route of administration for a subject at a given time.

[0245] In an aspect, a disclosed method can comprise repeating the administering of the genetically modified cells expressing a chimeric antigen receptor targeting phosphatidylserine (PS) or a pharmaceutical formulation thereof or engineered T cells or NK cells or macrophages expressing a chimeric antigen receptor targeting phosphatidylserine (PS) or a pharmaceutical formulation thereof.

[0246] In an aspect, a disclosed method of treating cancer can comprise protecting the subject from metastasis. In an aspect, a disclosed method of treating cancer can comprise reducing the risk of developing metastasis. In an aspect, a disclosed method of treating cancer can comprise preventing or inhibiting metastasis.

[0247] In an aspect, a disclosed method can comprise monitoring the subject for adverse effects. In an aspect, in the absence of adverse effects, a disclosed method can comprise continuing to treat the subject. In an aspect, continuing to treat the subject can comprise continuing to administer the genetically modified cells expressing a chimeric antigen receptor targeting phosphatidylserine (PS) or a pharmaceutical formulation thereof or engineered T cells or NK cells or macrophages expressing a chimeric antigen receptor targeting phosphatidylserine (PS) or a pharmaceutical formulation thereof. In an aspect, in the presence of adverse effects, a disclosed method can comprise modifying one or more steps of the method. In an aspect, modifying one or more steps of a disclosed method can comprise modifying the administering step. In an aspect, modifying the administering step can comprise changing the amount of the genetically modified cells expressing a chimeric antigen receptor targeting phosphatidylserine (PS) or a pharmaceutical formulation thereof or engineered T cells or NK cells or macrophages expressing a chimeric antigen receptor targeting phosphatidylserine (PS) or a pharmaceutical formulation thereof administered to the subject, changing the frequency of administration of the genetically modified cells expressing a chimeric antigen receptor targeting phosphatidylserine (PS) or a pharmaceutical formulation thereof or engineered T cells or NK cells or macrophages expressing a chimeric antigen receptor targeting phosphatidylserine (PS) or a pharmaceutical formulation thereof, changing the duration of administration of the genetically modified cells expressing a chimeric antigen receptor targeting phosphatidylserine (PS) or a pharmaceutical formulation thereof or engineered T cells or NK cells or macrophages expressing a chimeric antigen receptor targeting phosphatidylserine (PS) or a pharmaceutical formulation thereof, changing the route of administration of the genetically modified cells expressing a chimeric antigen receptor targeting phosphatidylserine (PS) or a pharmaceutical formulation thereof or engineered T cells or NK cells or macrophages expressing a chimeric antigen receptor targeting phosphatidylserine (PS) or a pharmaceutical formulation thereof, or any combination thereof.

[0248] In an aspect, a disclosed method of treating cancer can further comprise administering to the subject an immune checkpoint inhibitor (e.g., an anti-PD1 molecule). In an aspect, a disclosed anti-PD1 molecule can comprise an anti-PD1 antibody, an anti-PDL1 antibody, or any combination thereof. In an aspect, a disclosed anti-PD1 antibody can comprise a monoclonal antibody, a humanized monoclonal antibody, or a fragment thereof. In an aspect, a disclosed anti-PD1 antibody can comprise a polyclonal antibody, a humanized polyclonal antibody, or a fragment thereof. In an aspect, a disclosed anti-PD1 antibody can comprise any antibody or antibody fragment that specifically recognizes PD1. In an aspect, a disclosed anti-PDL1 antibody can comprise a monoclonal antibody, a humanized monoclonal antibody, or a fragment thereof. In an aspect, a disclosed anti-PDL1 antibody can comprise a polyclonal antibody, a humanized polyclonal antibody, or a fragment thereof. In an aspect, a disclosed anti-PDL1 antibody can comprise any antibody or antibody fragment that specifically recognizes PDL1. Antibodies and methods of preparing antibodies are known in the art. Similarly, recombinant antibodies and methods of preparing recombinant antibodies are known in the art.

[0249] In an aspect, a disclosed method of treating cancer can further comprise repeating the administering of the anti-PD1 molecule. In an aspect, a disclosed anti-PD1 molecule can be administered prior to, concurrent with, or after the administration of the interfering molecule.

[0250] In an aspect of a disclosed method of treating cancer, administering a disclosed anti-PD1 molecule can comprise systemic or direct administration. In an aspect, administering a disclosed anti-PD1 molecule can comprise intravenous administration, intratumoral administration, intraperitoneal administration, or any combination thereof. In an aspect, administering a disclosed can be administered by any method of administration disclosed herein. In an aspect, a disclosed anti-PD1 molecule can be administered via multiple routes either concurrently or sequentially. For example, in an aspect, a disclosed anti-PD1 molecule can be first administered intratumorally and then be administered intravenously. In an aspect, administering a disclosed anti-PD1 molecule can be first administered intratumorally and then be administered orally. A skilled clinician can determine the best route of administration for a subject at a given time.

[0251] For example, in an aspect, a disclosed anti-PD1 molecule can be administered about 3 months, about 2 months, or about 1 month prior to the administering of the genetically modified cells expressing a chimeric antigen receptor targeting phosphatidylserine (PS) or a pharmaceutical formulation thereof or engineered T cells or NK cells or macrophages expressing a chimeric antigen receptor targeting phosphatidylserine (PS) or a pharmaceutical formulation thereof. In an aspect, a disclosed anti-PD1 molecule can be administered about 8 weeks, about 7 weeks, about 6 weeks, about 5 weeks, about 4 weeks, about 3 weeks, about 2 weeks, or about 1 week prior to the administering of the genetically modified cells expressing a chimeric antigen receptor targeting phosphatidylserine (PS) or a pharmaceutical formulation thereof or engineered T cells or NK cells or macrophages expressing a chimeric antigen receptor targeting phosphatidylserine (PS) or a pharmaceutical formulation thereof. In an aspect, a disclosed anti-PD1 molecule can be administered about 30, 29, 28, 27, 26, 25, 24, 23, 22, 21, 20, 19, 18, 17, 16, 15, 14, 13, 12, 11, 10, 9, 8, 7, 6, 5, 4, 3, 2 or 1 day prior to the administering of the genetically modified cells expressing a chimeric antigen receptor targeting phosphatidylserine (PS) or a pharmaceutical formulation thereof or engineered T cells or NK cells or macrophages expressing a chimeric antigen receptor targeting phosphatidylserine (PS) or a pharmaceutical formulation thereof. In an aspect, a disclosed anti-PD1 molecule can be administered about 24, 23, 22, 21, 20, 19, 18, 17, 16, 15, 14, 13, 12, 11, 10, 9, 8, 7, 6, 5, 4, 3, 2, or 1 hours prior to the administering of the genetically modified cells expressing a chimeric antigen receptor targeting phosphatidylserine (PS) or a pharmaceutical formulation thereof or engineered T cells or NK cells or macrophages expressing a chimeric antigen receptor targeting phosphatidylserine (PS) or a pharmaceutical formulation thereof.

[0252] In an aspect, a disclosed method of treating cancer can comprise administering to the subject one or more additional anti-cancer therapies. Anti-cancer therapies are known to the art. In an aspect, a disclosed anti-cancer therapy can comprise endocrine therapy, radiotherapy, hormone therapy, gene therapy, thermal therapy, ultrasound therapy, or any combination thereof. In an aspect, a disclosed anti-cancer therapy can comprise one or more chemotherapeutic agents. In an aspect, a disclosed chemotherapeutic agent can comprise an anthracycline, a vinca alkaloid, an alkylating agent, an immune cell antibody, an antimetabolite, a TNFR glucocorticoid induced TNFR related protein (GITR) agonist, a proteasome inhibitor, an immunomodulator, or any combination thereof. In an aspect, a disclosed chemotherapeutic agent can comprise 5-fluorouracil (Adrucil, Efudex), 6-mercaptopurine (Purinethol), 6-thioguanine, aclarubicin or aclacinomycin A, alemtuzamab (Lemtrada), anastrozole (Arimidex), axitinib (Inlyta), bevacizumab (Avastin), bicalutamide (Casodex), bleomycin sulfate (Blenoxane), bortezomib (Velcade), busulfan (Myleran), busulfan injection (Busulfex), capecitabine (Xeloda), carboplatin (Paraplatin), carmustine (BiCNU), chlorambucil (Leukeran), cisplatin (Platinol), cladribine (Leustatin), Cosmegan, cyclophosphamide (Cytoxan or Neosar), cyclophosphamide, cytarabine liposome injection (DepoCyt), cytarabine, cytosine arabinoside (Cytosar-U), dacarbazine (DTIC-Dome), dactinomycin (Cosmegen), daunorubicin citrate liposome injection (DaunoXome), daunorubicin hydrochloride (Cerubidine), dexamethasone, docetaxel (Taxotere), doxorubicin hydrochloride (Adriamycin, Rubex), etoposide (Vepesid), fludarabine phosphate (Fludara), flutamide (Eulexin), folic acid antagonists, gemcitabine (difluorodeoxycitidine), gemtuzumab, gliotoxin, hydroxyurea (Hydrea), Idarubicin (Idamycin), ifosfamide (IFEX), ifosfamide, irinotecan (Camptosar), L-asparaginase (ELSPAR), lenalidomide), leucovorin calcium, melphalan (Alkeran), melphalan, methotrexate (Folex), mitoxantrone (Novantrone), mylotarg, N4-pentoxycarbonyl-5 deoxy-5-fluorocytidine, nab-paclitaxel (Abraxane), paclitaxel (Taxol), pentostatin, phoenix (Yttrium90/MX-DTPA), polifeprosan 20 with carmustine implant (Gliadel), purine analogs and adenosine deaminase inhibitors (fludarabine), pyrimidine analogs, rituximab, tamoxifen citrate (Nolvadex), temozolomide), teniposide (Vumon), tezacitibine, thalidomide or a thalidomide derivative, thiotepa, tirapazamine (Tirazone), topotecan hydrochloride for injection (Hycamptin), tositumomab), vinblastine (Velban), vinblastine, vincristine (Oncovin), vindesine, vinorelbine (Navelbine), or any combination thereof.

[0253] In an aspect, a disclosed method of treating cancer can comprise administering to the subject an anti-chemokine therapy. In an aspect, a disclosed anti-chemokine therapy can comprise one or more antibodies against CCL1, CCL2, CCL4, CCL17, CCL19, CCL21, CCL22, CCL25, CXCL9, CXCL10, CXCL11, CXCL12, CXCL13, CCR2, CCR5, CCR7, CCR8, CCR9, CXCR3, CXCR4, CXCR5, CX3CL1, CX3CR1, or any combination thereof.

[0254] In an aspect, a disclosed method of treating cancer can comprise administering an oligonucleotide therapeutic agent. A disclosed oligonucleotide therapeutic agent can comprise a single-stranded or double-stranded DNA, iRNA, shRNA, siRNA, mRNA, non-coding RNA (ncRNA), an antisense molecule, miRNA, a morpholino, a peptide-nucleic acid (PNA), or an analog or conjugate thereof. In an aspect, a disclosed oligonucleotide therapeutic agent can be an ASO or an RNAi. In an aspect, a disclosed oligonucleotide therapeutic agent can comprise one or more modifications at any position applicable. In an aspect, a disclosed oligonucleotide therapeutic agent can comprise a CRISPR-based endonuclease. In an aspect, a disclosed endonuclease can be Cas9. CRISPR/Cas9 systems and methods are known to the art.

[0255] In an aspect, a disclosed method of treating cancer can further comprise preventing or inhibiting metastasis of cancer cells. In an aspect, a disclosed method can comprise a 10%, 20%, 30%, 40%, 50%, 60%, 70%, 80%, 90%, 100%, or any amount of decrease or reduction in the risk of and/or actual metastasis of cancer cells when compared to a control subject (such as, for example, a subject that has not received a disclosed treatment (e.g., genetically modified cells expressing a chimeric antigen receptor targeting phosphatidylserine (PS) or a pharmaceutical formulation thereof or engineered T cells or NK cells or macrophages expressing a chimeric antigen receptor targeting phosphatidylserine (PS) or a pharmaceutical formulation thereof)). In an aspect, preventing or inhibiting metastasis of cancer cells can comprise a 10-20%, 20-30%, 30-40%, 40-50%, 50-60%, 60-70%, 70-80%, 80-90%, or 90-100% or any amount of decrease or reduction in the risk of and/or actual metastasis of cancer cells when compared to a control subject (such as, for example, a subject that has not received a disclosed treatment (e.g., genetically modified cells expressing a chimeric antigen receptor targeting phosphatidylserine (PS) or a pharmaceutical formulation thereof or engineered T cells or NK cells or macrophages expressing a chimeric antigen receptor targeting phosphatidylserine (PS) or a pharmaceutical formulation thereof).

[0256] In an aspect, a disclosed method of treating cancer can comprise surgically resecting the tumor and/or cancer cells from the subject. In an aspect, following resecting the tumor and/or cancer cells from the subject, a disclosed method of treating cancer can comprise continuing to administer to the subject a therapeutically effective amount of the genetically modified cells expressing a chimeric antigen receptor targeting phosphatidylserine (PS) or a pharmaceutical formulation thereof or engineered T cells or NK cells or macrophages expressing a chimeric antigen receptor targeting phosphatidylserine (PS) or a pharmaceutical formulation thereof and continuing to administer to the subject a therapeutically effective amount of an anti-PD1 molecule, a disclosed anti-chemokine therapy, a disclosed chemotherapeutic agent, any disclosed therapeutic agent, or any combination thereof.

[0257] In an aspect, a disclosed method of treating cancer can further comprise subjecting the subject to one or more invasive or non-invasive diagnostic assessments. Diagnostic assessments are known to the art. In an aspect, a disclosed non-invasive diagnostic assessment can comprise x-rays, computerized tomography (CT) scans, magnetic resonance imaging (MRI) scans, ultrasounds, positron emission tomography (PET) scans, or any combination thereof. In an aspect, a disclosed invasive diagnostic assessment can comprise a tissue biopsy or exploratory surgery.

[0258] In an aspect, a disclosed method of treating cancer can restore one or more aspects of cellular homeostasis and/or cellular functionality and/or metabolic dysregulation in a subject, such as, for example, a subject having cancer or cancerous cells. In an aspect, a disclosed interfering molecule can restore one or more aspects of cellular homeostasis and/or cellular functionality and/or metabolic dysregulation in a subject having cancer. In an aspect, metabolic dysregulation can be associated with cancer or cancerous cells. In an aspect, restoring one or more aspects of cellular homeostasis and/or cellular functionality can comprise one or more of the following: (i) correcting cell starvation in one or more cell types; (ii) normalizing aspects of the autophagy pathway (such as, for example, correcting, preventing, reducing, and/or ameliorating autophagy); (iii) improving, enhancing, restoring, and/or preserving mitochondrial functionality and/or structural integrity; (iv) improving, enhancing, restoring, and/or preserving organelle functionality and/or structural integrity; (v) correcting enzyme dysregulation; (vi) reversing, inhibiting, preventing, stabilizing, and/or slowing the rate of progression of the multi-systemic manifestations of a cancer; (vii) reversing, inhibiting, preventing, stabilizing, and/or slowing the rate of progression of a cancer, or (viii) any combination thereof. In an aspect, restoring one or more aspects of cellular homeostasis can comprise improving, enhancing, restoring, and/or preserving one or more aspects of cellular structural and/or functional integrity. In an aspect, restoration can be a partial or incomplete restoration. In an aspect, restoration can be complete or near complete restoration such that the level of expression, activity, and/or functionality is similar to that of a wild-type or control level. In an aspect, restoring one or more aspects of cellular homeostasis and/or cellular functionality can comprise preventing or inhibiting metastasis of cancer cells in the subject.

[0259] In an aspect of a disclosed method of treating cancer, techniques to monitor, measure, and/or assess the restoring one or more aspects of cellular homeostasis and/or cellular functionality can comprise qualitative (or subjective) means as well as quantitative (or objective) means. These means are known to the skilled person. For example, representative regulated variables and sensors relating to systemic homeostasis are provided below.

| Regulated Variable | Sensor |
|---|---|
| Blood Pressure/Blood | Aortic Body (Aorta), Carotid Body (Carotid |
| Volume/Na⁺ Conc./ | Artery), Atrial Volume Receptors (Heart), |
| | Juxtaglomerular Apparatus (Kidney) |
| Ca²⁺/Mg²⁺/PO₄³⁻ Conc. | Chief Cells (Parathyroid Gland) |
| Glucose | Islet of Langerhans (Pancreas) |
| Osmolarity | Circumventricular Organs (Hypothalamus) |
| pO₂, pCO₂, and pH | Aortic Body (Aorta), Carotid Body (Carotid |
| | Artery), Ventrolateral Medulla (Medulla) |
| Temperature | Thermosensory neurons (Skin), Preoptic Area |
| | (Hypothalamus) |

[0260] In an aspect, a disclosed method of treating cancer can further comprise administering genetically modified cells expressing a chimeric antigen receptor targeting phosphatidylserine (PS) or a pharmaceutical formulation thereof or engineered T cells or NK cells or macrophages expressing a chimeric antigen receptor targeting phosphatidylserine (PS) or a pharmaceutical formulation thereof one or more times, administering an anti-PD1 molecule one or more times, administering one or more anti-cancer therapies one or more times, or administering any combination thereof one or more time.

[0261] In an aspect, preventing or inhibiting metastasis of cancer cells can comprise a 10%, 20%, 30%, 40%, 50%, 60%, 70%, 80%, 90%, 100%, or any amount of decrease or reduction in the risk of and/or actual metastasis of cancer cells when compared to a control subject (such as, for example, a subject that has not received a disclosed treatment (e.g., genetically modified cells expressing a chimeric antigen receptor targeting phosphatidylserine (PS) or a pharmaceutical formulation thereof or engineered T cells or NK cells or macrophages expressing a chimeric antigen receptor targeting phosphatidylserine (PS) or a pharmaceutical formulation thereof). In an aspect, preventing or inhibiting metastasis of cancer cells can comprise a 10-20%, 20-30%, 30-40%, 40-50%, 50-60%, 60-70%, 70-80%, 80-90%, or 90-100% or any amount of decrease or reduction in the risk of and/or actual metastasis of cancer cells when compared to a control subject (such as, for example, a subject that has not received a disclosed treatment (e.g., genetically modified cells expressing a chimeric antigen receptor targeting phosphatidylserine (PS) or a pharmaceutical formulation thereof or engineered T cells or NK cells or macrophages expressing a chimeric antigen receptor targeting phosphatidylserine (PS) or a pharmaceutical formulation thereof).

[0262] In an aspect, a disclosed method of treating cancer can comprise surgically resecting the tumor and/or cancer cells from the subject. In an aspect, following resecting the tumor and/or cancer cells from the subject, a disclosed method of treating cancer can comprise continuing to administer to the subject a therapeutically effective amount of a disclosed pharmaceutical formulation. In an aspect, a disclosed method of treating cancer can further comprise diagnosing the subject as have cancer or cancerous cells.

[0263] In an aspect, a disclosed method of treating cancer can improve and/or extend the survivability of the subject, can improve a subject''s quality of life, can increase and/or prolong a subject''s life span, or any combination thereof. In an aspect, a disclosed method of treating cancer can stimulate an effector cell mediated immune modulator response to PS-expressing tumor cells. In an aspect, a disclosed method of treating cancer can induce a tumor reducing immune response. In an aspect, a disclosed method of treating cancer can induce phagocytosis of cancer cells in the subject. In an aspect, a disclosed method of treating cancer can cross-prime an anti-tumor T cell response. In an aspect, a disclosed method of treating cancer can induce a tumor eliminating immune response. In an aspect, a disclosed pharmaceutical formulation can treat cancer.

[0264] In an aspect, a disclosed method of treating cancer can comprise administering to the subject a chimeric fusion receptor comprising a PS-binding domain.

### F. Methods of Stimulating an Effector Cell Mediated Immune Modulator Response

[0265] Disclosed herein is a method of stimulating an effector cell mediated immune modulator response to PS-expressing tumor cells, the method comprising administering to a subject in need thereof a therapeutically effective amount of one or more cells transduced with a disclosed recombinant vector or a pharmaceutical formulation thereof, wherein the one or more cells express a CAR. Disclosed herein is a method of stimulating an effector cell mediated immune modulator response to PS-expressing tumor cells, the method comprising administering to a subject in need thereof therapeutically effective amount of one or more cells transformed with a disclosed plasmid or a pharmaceutical formulation thereof, wherein the one or more cells express a CAR. Disclosed herein is a method of stimulating an effector cell mediated immune modulator response to PS-expressing tumor cells, the method comprising administering to a subject in need thereof a therapeutically effective amount of one or more genetically modified cells expressing a chimeric antigen receptor targeting phosphatidylserine (PS) or a pharmaceutical formulation thereof. Disclosed herein is a method of stimulating an effector cell mediated immune modulator response to PS-expressing tumor cells, the method comprising administering to a subject in need thereof a therapeutically effective amount of one or more immune cells transduced with a recombinant vector or a pharmaceutical formulation thereof, wherein the one or more cells express a CAR.

[0266] Disclosed herein is a method of stimulating an effector cell mediated immune modulator response to PS-expressing tumor cells, the method comprising administering to a subject in need thereof a therapeutically effective amount of one or more immune cells transformed with a disclosed plasmid or a pharmaceutical formulation thereof, wherein the one or more cells express a CAR. Disclosed herein is a method of stimulating an effector cell mediated immune modulator response to PS-expressing tumor cells, the method comprising administering to a subject in need thereof a therapeutically effective amount of one or more cells expressing a chimeric antigen receptor targeting phosphatidylserine (PS) or a pharmaceutical formulation thereof. Disclosed herein is a method of stimulating an effector cell mediated immune modulator response to PS-expressing tumor cells, the method comprising administering to a subject in need thereof a therapeutically effective amount of one or more cells expressing a chimeric antigen receptor targeting phosphatidylserine-expressing tumor cells or a pharmaceutical formulation thereof.

[0267] In an aspect, wherein the CAR targets phosphatidylserine (PS)-expressing cancer cells.

[0268] In an aspect, disclosed PS-expressing cancer cells can be in a tumor. In an aspect, disclosed PS-expressing cancer cells can be in one or more tumors. In an aspect, disclosed cancer cells can be blood borne.

[0269] In an aspect, a disclosed method of stimulating an effector cell mediated immune modulator response to PS-expressing tumor cell can treat cancer. In an aspect, a disclosed method of stimulating an effector cell mediated immune modulator response to PS-expressing tumor cells can induce a tumor reducing immune response. In an aspect, a disclosed method of stimulating an effector cell mediated immune modulator response to PS-expressing tumor cells can induce phagocytosis of cancer cells in the subject. In an aspect, a disclosed method of stimulating an effector cell mediated immune modulator response to PS-expressing tumor cells can cross-primer an anti-tumor T cell response. In an aspect, a disclosed method of stimulating an effector cell mediated immune modulator response to PS-expressing tumor cells cancer can induce a tumor eliminating immune response.

[0270] In an aspect, a disclosed method of stimulating an effector cell mediated immune modulator response to PS-expressing tumor cells can comprise transducing extracted T cells or NK cells or macrophages ex vivo with a disclosed vector or a disclosed nucleic acid molecule such that the T cells, NK cells, or macrophages express a disclosed CAR, and returning the CAR-expressing T cells, NK cells, or macrophages back to the subject.

[0271] In an aspect, the cells can be autologous to the subject.

[0272] In an aspect, cancer cells can comprise ovarian cancer, ovarian adenocarcinoma, ovarian teratocarcinoma, lung cancer, small cell lung cancer (SCLC), non-small cell lung cancer (NSCLC), squamous cell lung carcinoma, adenocarcinoma, gastric cancer, breast cancer, hepatic cancer, pancreatic cancer, skin cancer, in particular basal cell carcinoma and squamous cell carcinoma, malignant melanoma, head and neck cancer, malignant pleomorphic adenoma, sarcoma, synovial sarcoma, carcinosarcoma, bile duct cancer, bladder cancer, transitional cell carcinoma, papillary carcinoma, kidney cancer, renal cell carcinoma, clear cell renal cell carcinoma, papillary renal cell carcinoma, colon cancer, small bowel cancer, small bowel adenocarcinoma, adenocarcinoma of the ileum, testicular embryonal carcinoma, placental choriocarcinoma, cervical cancer, testicular cancer, testicular seminoma, testicular teratoma, embryonic testicular cancer, uterine cancer, teratocarcinoma, embryonal carcinoma, or any combination thereof.

[0273] Thus, in an aspect, a subject can have, be diagnosed with, or be suspected of having ovarian cancer, ovarian adenocarcinoma, ovarian teratocarcinoma, lung cancer, small cell lung cancer (SCLC), non-small cell lung cancer (NSCLC), squamous cell lung carcinoma, adenocarcinoma, gastric cancer, breast cancer, hepatic cancer, pancreatic cancer, skin cancer, in particular basal cell carcinoma and squamous cell carcinoma, malignant melanoma, head and neck cancer, malignant pleomorphic adenoma, sarcoma, synovial sarcoma, carcinosarcoma, bile duct cancer, bladder cancer, transitional cell carcinoma, papillary carcinoma, kidney cancer, renal cell carcinoma, clear cell renal cell carcinoma, papillary renal cell carcinoma, colon cancer, small bowel cancer, small bowel adenocarcinoma, adenocarcinoma of the ileum, testicular embryonal carcinoma, placental choriocarcinoma, cervical cancer, testicular cancer, testicular seminoma, testicular teratoma, embryonic testicular cancer, uterine cancer, teratocarcinoma, embryonal carcinoma, or any combination thereof.

[0274] In an aspect, a disclosed method of stimulating an effector cell mediated immune modulator response to PS-expressing tumor cells can further comprise collecting one or more blood and/or biological samples from a subject at the same time or at different times. For example, in an aspect, a blood sample and/or a biological sample can be collected from a subject at a pre-determined interval. In an aspect, a pre-determined interval can be once a week, once every 2 weeks, once every 3 weeks, once every 4 weeks, once every 5 weeks, once every 6 weeks, once every 7 weeks, once every 8 weeks, or at a longer interval. In an aspect, a pre-determined interval can be once a month, once every 2 months, once every 3 months, once every 5 months, once every 5 months, once every 6 months, or at a longer interval. In an aspect, a blood sample and/or a biological sample can be collected from a subject prior to treatment, during treatment, after treatment, or any combination thereof. In an aspect, a blood and/or a biological sample can be collected from a subject at any time deemed medically and/or clinically appropriate by the skilled clinician.

[0275] In an aspect, a disclosed method of stimulating an effector cell mediated immune modulator response to PS-expressing tumor cells can further comprise isolating monocytes from peripheral blood monocular cells in the subject''s blood and/or biological sample. In an aspect, a disclosed method of stimulating an effector cell mediated immune modulator response to PS-expressing tumor cells can further comprise isolating bone marrow derived monocytes from the subject''s blood and/or biological sample. In an aspect, a disclosed method of stimulating an effector cell mediated immune modulator response to PS-expressing tumor cells can further comprise isolating monocytes from the subject''s blood and/or biological sample. In an aspect, a disclosed method of stimulating an effector cell mediated immune modulator response to PS-expressing tumor cells can further comprise isolating naïve macrophages (M0) from the subject''s blood and/or biological sample. In an aspect, a disclosed method of stimulating an effector cell mediated immune modulator response to PS-expressing tumor cells can further comprise subjecting a disclosed blood sample to centrifugation. In an aspect, a disclosed method of stimulating an effector cell mediated immune modulator response to PS-expressing tumor cells can further comprise separating the blood and/or biological sample into its component parts using, for example, centrifugation, apheresis, or any technique to the skilled person. In an aspect, a disclosed separating step can comprise generating a layer of clear fluid, a layer of red fluid, and a thin layer in between the clear fluid layer and the red fluid layer. In an aspect, a disclosed red layer can comprise red blood cells. In an aspect, a disclosed clear layer can comprise plasma. In an aspect, a disclosed thin layer in between the red layer and the clear layer can comprise the buffy coat. In an aspect, a disclosed buffy coat can comprise white blood cells and platelets. In an aspect, a disclosed method can further comprise isolating peripheral blood mononuclear cells (PMBCs) from the buffy coat. In an aspect, PMBCs can comprise lymphocytes, leukocytes, and/or monocytes. In an aspect, macrophages can be derived from monocytes. In an aspect, isolating lymphocytes, leukocytes, and/or monocytes can be done by any method and/or technique known to the skilled person (e.g., leukapheresis).

[0276] In an aspect, a disclosed method of stimulating an effector cell mediated immune modulator response to PS-expressing tumor cells can further comprise isolating resting or M0 macrophages from the buffy coat. In an aspect, a disclosed method of stimulating an effector cell mediated immune modulator response to PS-expressing tumor cells can further comprise differentiating monocytes into resting or M0 macrophages. In an aspect of a disclosed method of stimulating an effector cell mediated immune modulator response to PS-expressing tumor cells, the disclosed macrophages can be resting or M0 macrophages. In an aspect, a disclosed method of stimulating an effector cell mediated immune modulator response to PS-expressing tumor cells can further comprise polarizing the resting or M0 macrophages into a M1 phenotype or a M2 phenotype or a pro-inflammatory phenotype or an anti-inflammatory phenotype. In an aspect, a disclosed method of stimulating an effector cell mediated immune modulator response to PS-expressing tumor cells can further comprise polarizing the resting or M0 macrophages into a classically activated macrophage phenotype.

[0277] In an aspect, a therapeutically effective amount or effective dose or effective amount or therapeutically effective dosage of disclosed engineered T cells or NK cells or macrophages can be any amount that, when used alone or in combination with another therapeutic agent, can attack and destroy PS-expressing tumor cells. In an aspect, a therapeutically effective amount or effective dose or effective amount or therapeutically effective dosage of the disclosed genetically modified cells expressing a chimeric antigen receptor targeting phosphatidylserine (PS) or a pharmaceutical formulation thereof or the disclosed engineered T cells or NK cells or macrophages expressing a chimeric antigen receptor targeting phosphatidylserine (PS) or a pharmaceutical formulation thereof can be any amount that, when used alone or in combination with another therapeutic agent, can attack and destroy PS-expressing tumor cells.

[0278] In an aspect, a therapeutically effective amount of the disclosed genetically modified cells expressing a disclosed chimeric antigen receptor targeting phosphatidylserine (PS) (e.g., T cells, NK cells, and/or macrophages) can be about 1×10⁴ to about 1×10⁹ cells/kg per subject. In an aspect, a therapeutically effective amount of the disclosed genetically modified cells expressing a disclosed chimeric antigen receptor targeting phosphatidylserine (PS) (e.g., T cells, NK cells, and/or macrophages) can be about 1×10⁵ cells/kg per subject, about 1×10⁶ cells/kg per subject, about 1×10⁷ cells/kg per subject, about 1×10⁸ cells/kg per subject, or about 1×10⁹ cells/kg per subject.

[0279] In an aspect, a therapeutically effective amount or effective dose or effective amount or therapeutically effective dosage of the disclosed genetically modified cells expressing a chimeric antigen receptor targeting phosphatidylserine (PS) or a pharmaceutical formulation thereof or the disclosed engineered T cells or NK cells or macrophages expressing a chimeric antigen receptor targeting phosphatidylserine (PS) or a pharmaceutical formulation thereof can protect a subject against the onset of a disease and/or promotes disease regression evidenced by a decrease in severity of disease symptoms, an increase in frequency and duration of disease symptom-free periods, or a prevention of impairment or disability due to the disease affliction. The ability of a therapeutic agent to promote disease regression can be evaluated using a variety of methods known to the skilled practitioner, such as in human subjects during clinical trials, in animal model systems predictive of efficacy in humans, or by assaying the activity of the agent in in vitro assays.

[0280] In an aspect, administering genetically modified cells expressing a chimeric antigen receptor targeting phosphatidylserine (PS) or a pharmaceutical formulation thereof or administering engineered T cells or NK cells or macrophages expressing a chimeric antigen receptor targeting phosphatidylserine (PS) or a pharmaceutical formulation thereof can comprise systemic or direct administration. In an aspect, administering can comprise oral administration, intravenous administration, intratumoral administration, intraperitoneal administration, or any combination thereof. In an aspect, administering genetically modified cells expressing a chimeric antigen receptor targeting phosphatidylserine (PS) or a pharmaceutical formulation thereof or administering engineered T cells or NK cells or macrophages expressing a chimeric antigen receptor targeting phosphatidylserine (PS) or a pharmaceutical formulation thereof can be administered by any method of administration disclosed herein. In an aspect, genetically modified cells expressing a chimeric antigen receptor targeting phosphatidylserine (PS) or a pharmaceutical formulation thereof or engineered T cells or NK cells or macrophages expressing a chimeric antigen receptor targeting phosphatidylserine (PS) or a pharmaceutical formulation thereof can be administered via multiple routes either concurrently or sequentially.

[0281] For example, in an aspect, genetically modified cells expressing a chimeric antigen receptor targeting phosphatidylserine (PS) or a pharmaceutical formulation thereof or engineered T cells or NK cells or macrophages expressing a chimeric antigen receptor targeting phosphatidylserine (PS) or a pharmaceutical formulation thereof can be first administered intratumorally and then be administered intravenously. In an aspect, genetically modified cells expressing a chimeric antigen receptor targeting phosphatidylserine (PS) or a pharmaceutical formulation thereof or engineered T cells or NK cells or macrophages expressing a chimeric antigen receptor targeting phosphatidylserine (PS) or a pharmaceutical formulation thereof can be first administered intratumorally and then be administered orally. A skilled clinician can determine the best route of administration for a subject at a given time.

[0282] In an aspect, a disclosed method can comprise repeating the administering of the genetically modified cells expressing a chimeric antigen receptor targeting phosphatidylserine (PS) or a pharmaceutical formulation thereof or engineered T cells or NK cells or macrophages expressing a chimeric antigen receptor targeting phosphatidylserine (PS) or a pharmaceutical formulation thereof.

[0283] In an aspect, a disclosed method of stimulating an effector cell mediated immune modulator response to PS-expressing tumor cells can comprise protecting the subject from metastasis. In an aspect, a disclosed method of stimulating an effector cell mediated immune modulator response to PS-expressing tumor cells can comprise reducing the risk of developing metastasis. In an aspect, a disclosed method of stimulating an effector cell mediated immune modulator response to PS-expressing tumor cells can comprise preventing or inhibiting metastasis.

[0284] In an aspect, a disclosed method of stimulating an effector cell mediated immune modulator response to PS-expressing tumor cells can effect tumor cell death.

[0285] In an aspect, a disclosed method can comprise monitoring the subject for adverse effects. In an aspect, in the absence of adverse effects, a disclosed method can comprise continuing to treat the subject. In an aspect, continuing to treat the subject can comprise continuing to administer the genetically modified cells expressing a chimeric antigen receptor targeting phosphatidylserine (PS) or a pharmaceutical formulation thereof or engineered T cells or NK cells or macrophages expressing a chimeric antigen receptor targeting phosphatidylserine (PS) or a pharmaceutical formulation thereof. In an aspect, in the presence of adverse effects, a disclosed method can comprise modifying one or more steps of the method. In an aspect, modifying one or more steps of a disclosed method can comprise modifying the administering step. In an aspect, modifying the administering step can comprise changing the amount of the genetically modified cells expressing a chimeric antigen receptor targeting phosphatidylserine (PS) or a pharmaceutical formulation thereof or engineered T cells or NK cells or macrophages expressing a chimeric antigen receptor targeting phosphatidylserine (PS) or a pharmaceutical formulation thereof administered to the subject, changing the frequency of administration of the genetically modified cells expressing a chimeric antigen receptor targeting phosphatidylserine (PS) or a pharmaceutical formulation thereof or engineered T cells or NK cells or macrophages expressing a chimeric antigen receptor targeting phosphatidylserine (PS) or a pharmaceutical formulation thereof, changing the duration of administration of the genetically modified cells expressing a chimeric antigen receptor targeting phosphatidylserine (PS) or a pharmaceutical formulation thereof or engineered T cells or NK cells or macrophages expressing a chimeric antigen receptor targeting phosphatidylserine (PS) or a pharmaceutical formulation thereof, changing the route of administration of the genetically modified cells expressing a chimeric antigen receptor targeting phosphatidylserine (PS) or a pharmaceutical formulation thereof or engineered T cells or NK cells or macrophages expressing a chimeric antigen receptor targeting phosphatidylserine (PS) or a pharmaceutical formulation thereof, or any combination thereof.

[0286] In an aspect, a disclosed method of stimulating an effector cell mediated immune modulator response to PS-expressing tumor cells can further comprise administering to the subject an immune checkpoint inhibitor (e.g., an anti-PD1 molecule). In an aspect, a disclosed anti-PD1 molecule can comprise an anti-PD1 antibody, an anti-PDL1 antibody, or any combination thereof. In an aspect, a disclosed anti-PD1 antibody can comprise a monoclonal antibody, a humanized monoclonal antibody, or a fragment thereof. In an aspect, a disclosed anti-PD1 antibody can comprise a polyclonal antibody, a humanized polyclonal antibody, or a fragment thereof. In an aspect, a disclosed anti-PD1 antibody can comprise any antibody or antibody fragment that specifically recognizes PD1. In an aspect, a disclosed anti-PDL1 antibody can comprise a monoclonal antibody, a humanized monoclonal antibody, or a fragment thereof. In an aspect, a disclosed anti-PDL1 antibody can comprise a polyclonal antibody, a humanized polyclonal antibody, or a fragment thereof. In an aspect, a disclosed anti-PDL1 antibody can comprise any antibody or antibody fragment that specifically recognizes PDL1. Antibodies and methods of preparing antibodies are known in the art. Similarly, recombinant antibodies and methods of preparing recombinant antibodies are known in the art.

[0287] In an aspect, a disclosed method of stimulating an effector cell mediated immune modulator response to PS-expressing tumor cells can further comprise repeating the administering of the anti-PD1 molecule. In an aspect, a disclosed anti-PD1 molecule can be administered prior to, concurrent with, or after the administration of the interfering molecule.

[0288] In an aspect of a disclosed method of stimulating an effector cell mediated immune modulator response to PS-expressing tumor cells, administering a disclosed anti-PD1 molecule can comprise systemic or direct administration. In an aspect, administering a disclosed anti-PD1 molecule can comprise intravenous administration, intratumoral administration, intraperitoneal administration, or any combination thereof. In an aspect, administering a disclosed can be administered by any method of administration disclosed herein. In an aspect, a disclosed anti-PD1 molecule can be administered via multiple routes either concurrently or sequentially. For example, in an aspect, a disclosed anti-PD1 molecule can be first administered intratumorally and then be administered intravenously. In an aspect, administering a disclosed anti-PD1 molecule can be first administered intratumorally and then be administered orally. A skilled clinician can determine the best route of administration for a subject at a given time.

[0289] For example, in an aspect, a disclosed anti-PD1 molecule can be administered about 3 months, about 2 months, or about 1 month prior to the administering of the genetically modified cells expressing a chimeric antigen receptor targeting phosphatidylserine (PS) or a pharmaceutical formulation thereof or engineered T cells or NK cells or macrophages expressing a chimeric antigen receptor targeting phosphatidylserine (PS) or a pharmaceutical formulation thereof. In an aspect, a disclosed anti-PD1 molecule can be administered about 8 weeks, about 7 weeks, about 6 weeks, about 5 weeks, about 4 weeks, about 3 weeks, about 2 weeks, or about 1 week prior to the administering of the genetically modified cells expressing a chimeric antigen receptor targeting phosphatidylserine (PS) or a pharmaceutical formulation thereof or engineered T cells or NK cells or macrophages expressing a chimeric antigen receptor targeting phosphatidylserine (PS) or a pharmaceutical formulation thereof. In an aspect, a disclosed anti-PD1 molecule can be administered about 30, 29, 28, 27, 26, 25, 24, 23, 22, 21, 20, 19, 18, 17, 16, 15, 14, 13, 12, 11, 10, 9, 8, 7, 6, 5, 4, 3, 2 or 1 day prior to the administering of the genetically modified cells expressing a chimeric antigen receptor targeting phosphatidylserine (PS) or a pharmaceutical formulation thereof or engineered T cells or NK cells or macrophages expressing a chimeric antigen receptor targeting phosphatidylserine (PS) or a pharmaceutical formulation thereof. In an aspect, a disclosed anti-PD1 molecule can be administered about 24, 23, 22, 21, 20, 19, 18, 17, 16, 15, 14, 13, 12, 11, 10, 9, 8, 7, 6, 5, 4, 3, 2, or 1 hours prior to the administering of the genetically modified cells expressing a chimeric antigen receptor targeting phosphatidylserine (PS) or a pharmaceutical formulation thereof or engineered T cells or NK cells or macrophages expressing a chimeric antigen receptor targeting phosphatidylserine (PS) or a pharmaceutical formulation thereof.

[0290] In an aspect, a disclosed method of stimulating an effector cell mediated immune modulator response to PS-expressing tumor cells can comprise administering to the subject one or more additional anti-cancer therapies. Anti-cancer therapies are known to the art. In an aspect, a disclosed anti-cancer therapy can comprise endocrine therapy, radiotherapy, hormone therapy, gene therapy, thermal therapy, ultrasound therapy, or any combination thereof. In an aspect, a disclosed anti-cancer therapy can comprise one or more chemotherapeutic agents. In an aspect, a disclosed chemotherapeutic agent can comprise an anthracycline, a vinca alkaloid, an alkylating agent, an immune cell antibody, an antimetabolite, a TNFR glucocorticoid induced TNFR related protein (GITR) agonist, a proteasome inhibitor, an immunomodulator, or any combination thereof. In an aspect, a disclosed chemotherapeutic agent can comprise 5-fluorouracil (Adrucil, Efudex), 6-mercaptopurine (Purinethol), 6-thioguanine, aclarubicin or aclacinomycin A, alemtuzamab (Lemtrada), anastrozole (Arimidex), axitinib (Inlyta), bevacizumab (Avastin), bicalutamide (Casodex), bleomycin sulfate (Blenoxane), bortezomib (Velcade), busulfan (Myleran), busulfan injection (Busulfex), capecitabine (Xeloda), carboplatin (Paraplatin), carmustine (BiCNU), chlorambucil (Leukeran), cisplatin (Platinol), cladribine (Leustatin), Cosmegan, cyclophosphamide (Cytoxan or Neosar), cyclophosphamide, cytarabine liposome injection (DepoCyt), cytarabine, cytosine arabinoside (Cytosar-U), dacarbazine (DTIC-Dome), dactinomycin (Cosmegen), daunorubicin citrate liposome injection (DaunoXome), daunorubicin hydrochloride (Cerubidine), dexamethasone, docetaxel (Taxotere), doxorubicin hydrochloride (Adriamycin, Rubex), etoposide (Vepesid), fludarabine phosphate (Fludara), flutamide (Eulexin), folic acid antagonists, gemcitabine (difluorodeoxycitidine), gemtuzumab, gliotoxin, hydroxyurea (Hydrea), Idarubicin (Idamycin), ifosfamide (IFEX), ifosfamide, irinotecan (Camptosar), L-asparaginase (ELSPAR), lenalidomide), leucovorin calcium, melphalan (Alkeran), melphalan, methotrexate (Folex), mitoxantrone (Novantrone), mylotarg, N4-pentoxycarbonyl-5 deoxy-5-fluorocytidine, nab-paclitaxel (Abraxane), paclitaxel (Taxol), pentostatin, phoenix (Yttrium90/MX-DTPA), polifeprosan 20 with carmustine implant (Gliadel), purine analogs and adenosine deaminase inhibitors (fludarabine), pyrimidine analogs, rituximab, tamoxifen citrate (Nolvadex), temozolomide), teniposide (Vumon), tezacitibine, thalidomide or a thalidomide derivative, thiotepa, tirapazamine (Tirazone), topotecan hydrochloride for injection (Hycamptin), tositumomab), vinblastine (Velban), vinblastine, vincristine (Oncovin), vindesine, vinorelbine (Navelbine), or any combination thereof.

[0291] In an aspect, a disclosed method of stimulating an effector cell mediated immune modulator response to PS-expressing tumor cells can comprise administering to the subject an anti-chemokine therapy. In an aspect, a disclosed anti-chemokine therapy can comprise one or more antibodies against CCL1, CCL2, CCL4, CCL17, CCL19, CCL21, CCL22, CCL25, CXCL9, CXCL10, CXCL11, CXCL12, CXCL13, CCR2, CCR5, CCR7, CCR8, CCR9, CXCR3, CXCR4, CXCR5, CX3CL1, CX3CR1, or any combination thereof.

[0292] In an aspect, a disclosed method of stimulating an effector cell mediated immune modulator response to PS-expressing tumor cells can comprise administering an oligonucleotide therapeutic agent. A disclosed oligonucleotide therapeutic agent can comprise a single-stranded or double-stranded DNA, iRNA, shRNA, siRNA, mRNA, non-coding RNA (ncRNA), an antisense molecule, miRNA, a morpholino, a peptide-nucleic acid (PNA), or an analog or conjugate thereof. In an aspect, a disclosed oligonucleotide therapeutic agent can be an ASO or an RNAi. In an aspect, a disclosed oligonucleotide therapeutic agent can comprise one or more modifications at any position applicable. In an aspect, a disclosed oligonucleotide therapeutic agent can comprise a CRISPR-based endonuclease. In an aspect, a disclosed endonuclease can be Cas9. CRISPR/Cas9 systems and methods are known to the art.

[0293] In an aspect, a disclosed method of stimulating an effector cell mediated immune modulator response to PS-expressing tumor cells can further comprise preventing or inhibiting metastasis of cancer cells. In an aspect, a disclosed method can comprise a 10%, 20%, 30%, 40%, 50%, 60%, 70%, 80%, 90%, 100%, or any amount of decrease or reduction in the risk of and/or actual metastasis of cancer cells when compared to a control subject (such as, for example, a subject that has not received a disclosed treatment (e.g., genetically modified cells expressing a chimeric antigen receptor targeting phosphatidylserine (PS) or a pharmaceutical formulation thereof or engineered T cells or NK cells or macrophages expressing a chimeric antigen receptor targeting phosphatidylserine (PS) or a pharmaceutical formulation thereof)). In an aspect, preventing or inhibiting metastasis of cancer cells can comprise a 10-20%, 20-30%, 30-40%, 40-50%, 50-60%, 60-70%, 70-80%, 80-90%, or 90-100% or any amount of decrease or reduction in the risk of and/or actual metastasis of cancer cells when compared to a control subject (such as, for example, a subject that has not received a disclosed treatment (e.g., genetically modified cells expressing a chimeric antigen receptor targeting phosphatidylserine (PS) or a pharmaceutical formulation thereof or engineered T cells or NK cells or macrophages expressing a chimeric antigen receptor targeting phosphatidylserine (PS) or a pharmaceutical formulation thereof).

[0294] In an aspect, a disclosed method of stimulating an effector cell mediated immune modulator response to PS-expressing tumor cells can comprise surgically resecting the tumor and/or cancer cells from the subject. In an aspect, following resecting the tumor and/or cancer cells from the subject, a disclosed method of stimulating an effector cell mediated immune modulator response to PS-expressing tumor cells can comprise continuing to administer to the subject a therapeutically effective amount of the genetically modified cells expressing a chimeric antigen receptor targeting phosphatidylserine (PS) or a pharmaceutical formulation thereof or engineered T cells or NK cells or macrophages expressing a chimeric antigen receptor targeting phosphatidylserine (PS) or a pharmaceutical formulation thereof and continuing to administer to the subject a therapeutically effective amount of an anti-PD1 molecule, a disclosed anti-chemokine therapy, a disclosed chemotherapeutic agent, any disclosed therapeutic agent, or any combination thereof.

[0295] In an aspect, a disclosed method of stimulating an effector cell mediated immune modulator response to PS-expressing tumor cells can further comprise subjecting the subject to one or more invasive or non-invasive diagnostic assessments. Diagnostic assessments are known to the art. In an aspect, a disclosed non-invasive diagnostic assessment can comprise x-rays, computerized tomography (CT) scans, magnetic resonance imaging (MRI) scans, ultrasounds, positron emission tomography (PET) scans, or any combination thereof. In an aspect, a disclosed invasive diagnostic assessment can comprise a tissue biopsy or exploratory surgery.

[0296] In an aspect, a disclosed method of stimulating an effector cell mediated immune modulator response to PS-expressing tumor cells can restore one or more aspects of cellular homeostasis and/or cellular functionality and/or metabolic dysregulation in a subject, such as, for example, a subject having cancer or cancerous cells. In an aspect, a disclosed interfering molecule can restore one or more aspects of cellular homeostasis and/or cellular functionality and/or metabolic dysregulation in a subject having cancer. In an aspect, metabolic dysregulation can be associated with cancer or cancerous cells. In an aspect, restoring one or more aspects of cellular homeostasis and/or cellular functionality can comprise one or more of the following: (i) correcting cell starvation in one or more cell types; (ii) normalizing aspects of the autophagy pathway (such as, for example, correcting, preventing, reducing, and/or ameliorating autophagy); (iii) improving, enhancing, restoring, and/or preserving mitochondrial functionality and/or structural integrity; (iv) improving, enhancing, restoring, and/or preserving organelle functionality and/or structural integrity; (v) correcting enzyme dysregulation; (vi) reversing, inhibiting, preventing, stabilizing, and/or slowing the rate of progression of the multi-systemic manifestations of a cancer; (vii) reversing, inhibiting, preventing, stabilizing, and/or slowing the rate of progression of a cancer, or (viii) any combination thereof. In an aspect, restoring one or more aspects of cellular homeostasis can comprise improving, enhancing, restoring, and/or preserving one or more aspects of cellular structural and/or functional integrity. In an aspect, restoration can be a partial or incomplete restoration. In an aspect, restoration can be complete or near complete restoration such that the level of expression, activity, and/or functionality is similar to that of a wild-type or control level. In an aspect, restoring one or more aspects of cellular homeostasis and/or cellular functionality can comprise preventing or inhibiting metastasis of cancer cells in the subject.

[0297] In an aspect of a disclosed method of stimulating an effector cell mediated immune modulator response to PS-expressing tumor cells, techniques to monitor, measure, and/or assess the restoring one or more aspects of cellular homeostasis and/or cellular functionality can comprise qualitative (or subjective) means as well as quantitative (or objective) means. These means are known to the skilled person. For example, representative regulated variables and sensors relating to systemic homeostasis are discussed supra.

[0298] In an aspect, a disclosed method of stimulating an effector cell mediated immune modulator response to PS-expressing tumor cells can further comprise administering genetically modified cells expressing a chimeric antigen receptor targeting phosphatidylserine (PS) or a pharmaceutical formulation thereof or engineered T cells or NK cells or macrophages expressing a chimeric antigen receptor targeting phosphatidylserine (PS) or a pharmaceutical formulation thereof one or more times, administering an anti-PD1 molecule one or more times, administering one or more anti-cancer therapies one or more times, or administering any combination thereof one or more time.

[0299] In an aspect, preventing or inhibiting metastasis of cancer cells can comprise a 10%, 20%, 30%, 40%, 50%, 60%, 70%, 80%, 90%, 100%, or any amount of decrease or reduction in the risk of and/or actual metastasis of cancer cells when compared to a control subject (such as, for example, a subject that has not received a disclosed treatment (e.g., genetically modified cells expressing a chimeric antigen receptor targeting phosphatidylserine (PS) or a pharmaceutical formulation thereof or engineered T cells or NK cells or macrophages expressing a chimeric antigen receptor targeting phosphatidylserine (PS) or a pharmaceutical formulation thereof). In an aspect, preventing or inhibiting metastasis of cancer cells can comprise a 10-20%, 20-30%, 30-40%, 40-50%, 50-60%, 60-70%, 70-80%, 80-90%, or 90-100% or any amount of decrease or reduction in the risk of and/or actual metastasis of cancer cells when compared to a control subject (such as, for example, a subject that has not received a disclosed treatment (e.g., genetically modified cells expressing a chimeric antigen receptor targeting phosphatidylserine (PS) or a pharmaceutical formulation thereof or engineered T cells or NK cells or macrophages expressing a chimeric antigen receptor targeting phosphatidylserine (PS) or a pharmaceutical formulation thereof).

[0300] In an aspect, a disclosed method of stimulating an effector cell mediated immune modulator response to PS-expressing tumor cells can comprise surgically resecting the tumor and/or cancer cells from the subject. In an aspect, following resecting the tumor and/or cancer cells from the subject, a disclosed method of stimulating an effector cell mediated immune modulator response to PS-expressing tumor cells can comprise continuing to administer to the subject a therapeutically effective amount of a disclosed pharmaceutical formulation.

[0301] In an aspect, a disclosed method of stimulating an effector cell mediated immune modulator response to PS-expressing tumor cells can further comprise diagnosing the subject as have cancer or cancerous cells.

[0302] In an aspect, a disclosed method of stimulating an effector cell mediated immune modulator response to PS-expressing tumor cells can improve and/or extend the survivability of the subject, can improve a subject''s quality of life, can increase and/or prolong a subject''s life span, or any combination thereof. In an aspect, a disclosed method of stimulating an effector cell mediated immune modulator response to PS-expressing tumor cells can stimulate an effector cell mediated immune modulator response to PS-expressing tumor cells. In an aspect, a disclosed method of stimulating an effector cell mediated immune modulator response to PS-expressing tumor cells can induce a tumor reducing immune response. In an aspect, a disclosed method of stimulating an effector cell mediated immune modulator response to PS-expressing tumor cells can induce phagocytosis of cancer cells in the subject. In an aspect, a disclosed method stimulating an effector cell mediated immune modulator response to PS-expressing tumor cells can cross-prime an anti-tumor T cell response. In an aspect, a disclosed method of stimulating an effector cell mediated immune modulator response to PS-expressing tumor cells induce a tumor eliminating immune response. In an aspect, a disclosed pharmaceutical formulation can treat cancer. In an aspect, a disclosed method stimulating an effector cell mediated immune modulator response to PS-expressing tumor cells can comprise administering to the subject a chimeric fusion receptor comprising a PS-binding domain.

### G. Kits

[0303] Disclosed herein is a kit comprising one or more of a disclosed CAR, a disclosed isolated nucleic acid molecule, a disclosed vector, a disclosed pharmaceutical formulation, a disclosed host cell, or any combination thereof. Disclosed herein is a kit comprising one or more disclosed CARs, one or more disclosed isolated nucleic acid molecules, one or more disclosed vectors, one or more disclosed pharmaceutical formulations, one or more disclosed cells, or any combination thereof.

[0304] In an aspect, a disclosed kit can comprise one or more additional active agents and/or therapeutic agents. In an aspect, the one or more agents can treat, prevent, inhibit, and/or ameliorate one or more comorbidities in a subject. In an aspect, one or more active agents can treat, inhibit, prevent, and/or ameliorate cellular and/or metabolic complications related to cancer or cancer cells or cancerous cells.

[0305] In an aspect, a disclosed kit can comprise at least two components constituting the kit. Together, the components constitute a functional unit for a given purpose (such as, for example, treating a subject diagnosed with or suspected of having a disease or disorder such as cancer). Individual member components may be physically packaged together or separately. For example, a kit comprising an instruction for using the kit may or may not physically include the instruction with other individual member components. Instead, the instruction can be supplied as a separate member component, either in a paper form or an electronic form which may be supplied on a computer readable memory device or downloaded from an internet website, or as recorded presentation. In an aspect, a kit for use in a disclosed method can comprise one or more containers holding a disclosed CAR, a disclosed isolated nucleic acid molecule, a disclosed vector, a disclosed pharmaceutical formulation, a disclosed host cell, or any combination thereof, and a label or package insert with instructions for use. In an aspect, suitable containers include, for example, bottles, vials, syringes, blister pack, etc. The containers can be formed from a variety of materials such as glass or plastic. The container can hold a disclosed CAR, a disclosed isolated nucleic acid molecule, a disclosed vector, a disclosed pharmaceutical formulation, a disclosed host cell, or any combination thereof, and can have a sterile access port (for example the container may be an intravenous solution bag or a vial having a stopper pierceable by a hypodermic injection needle). The label or package insert can indicate a disclosed CAR, a disclosed isolated nucleic acid molecule, a disclosed vector, a disclosed pharmaceutical formulation, a disclosed host cell, or any combination thereof can be used for treating, preventing, inhibiting, and/or ameliorating a disease or disorder or complications and/or symptoms associated with a disease or disorder such as cancer or metastatic cancer. A kit can comprise additional components necessary for administration such as, for example, other buffers, diluents, filters, needles, and syringes.

[0306] In an aspect, a disclosed kit can be used to treat cancer. In an aspect, a disclosed kit can be used to stimulate an effector cell mediated immune modulator response to PS-expressing tumor cells. In an aspect, a disclosed kit can be used to preventing or inhibiting metastasis of cancer cells. In an aspect, a disclosed kit can be used to risk of developing metastases. In an aspect, a disclosed kit can be used to validate the efficacy and/or toxicity of a disclosed CAR, a disclosed isolated nucleic acid molecule, a disclosed vector, a disclosed pharmaceutical formulation, a disclosed host cell, or any combination thereof.

### H. Miscellaneous

[0307] Disclosed herein is a chimeric antigen receptor (CAR) that binds phosphatidylserine (PS) on the surface of tumor cells and activates immune effector cells to eliminate tumor cells that express PS on their surface spontaneously or under stress, the CAR receptor comprising: (i) an extracellular portion that is a PS-binding domain; (ii) a transmembrane domain; and (iii) an intracellular immunostimulatory domain. In an aspect, the intracellular immunostimulatory domain comprises one or more immunostimulatory signaling domains from different immunostimulatory proteins. In an aspect, the extracellular PS-binding domain is selected from the group consisting of: (1) Human annexin A1 or its PS-binding core domain (aa41-346); (2) Human annexin A2; (3) Human annexin A3; (4) Human annexin A4; (5) Human annexin A5 (Annexin V); (6) Human annexin A6; (7) Human annexin A7; (8) Human annexin A8; (9) Human annexin A8L1; (10) Human annexin A8L2; (11) Human annexin A9; (12) Human annexin A10; (13) Human annexin A11; (14) Human annexin A13; (15) Extracellular domain of human BAI1 (brain angiogenesis inhibitor 1); (16) Human beta 2-glycoprotein I; (17) Human factor II; (18) Human factor VII; (19) Human factor IX; (20) Human factor X; (21) Human prothrombin; (22) Human growth arrest specific 6 (GAS6),; (23) Human MFG-E8 (lactaherin); (24) Extracellular domain of human RAGE; (25) Protein S; (26) Extracellular domain of STABILIN 1 & 2; (27) Extracellular domain of TIM1; (28) Extracellular domain of Tim3; (29) Extracellular domain of TIM4; (30) Phosphoatidylserine receptor (PSR); (31) Human PKCα C2 domain (aa 157-288); (32) RAGE (receptor for advanced glycation end products); (33) Human synaptotagmin (Syt1) C2A domain (aa141-266); (34) Stabilin-1; (35) Stabilin-2; and combinations thereof.

[0308] In an aspect, the extracellular domain comprises one or more chain variable domains (scFv). In an aspect, the chain variable domains (scFv) comprises a PS-binding antibody selected from the group consisting of: (1) Bavituximab; (2) PS binding antibody PGN632 (as published by Moody et al, JEM, 2010, 207:763-776); (3) PS binding antibody P1 (as published by Moody et al, JEM, 2010, 207:763-776); (4) PS binding antibody IS4 (as published by Moody et al, JEM, 2010, 207:763-776); (5) PS binding antibody CL1 (as published by Moody et al, JEM, 2010, 207:763-776); and combinations thereof. In an aspect, the extracellular domain further includes a spacer domain between the extracellular PS-binding domain and the transmembrane domain.

[0309] In an aspect, the spacer comprises: (i) an immunoglobulin hinge region; and (ii) an extracellular region of type 1 membrane proteins or the whole or part of immunoglobulin constant region. In an aspect, the extracellular spacer domain comprises the hinge regions, or any portion thereof, from the hinge regions from the group consisting of (1) CD8a; (2) CD28; (3) IgG1; (4) IgG2; (5) IgG3; (6) IgG4; (7) IgA; (8) IgD; and combinations thereof.

[0310] In an aspect, the transmembrane domain comprises a transmembrane domain of a transmembrane protein selected from the group consisting of: (1) CD2; (2) CD3γ; (3) CD3ε; (4) CD3δ; (5) CD3ξ; (6) CD4; (7) CD8; (8) CD25; (9) CD27; (10) CD28; (11) CD40; (12) CD79A; (13) CD79B; (14) CD80; (15) CD86; (16) CD95 (FAS); (17) CD134 (OX40); (18) CD137 (4-1BB); (19) CD278 (ICOS); (20) TCRα; (21) TCRβ; and combinations thereof.

[0311] In an aspect, the intracellular signaling domain comprises a single ITAM signaling domain selected from the group consisting of the signaling domains from the following immune signaling proteins: (1) CD3γ; (2) CD3ξ; (3) CD3ε; (4) CD3δ; (5) CD3ξ; (6) CD5; (7) CD22; (8) CD79a; (9) CD278 (ICOS); and combinations thereof. In an aspect, the CAR further comprises a co-stimulatory domain from the signaling domains of an immune-signaling molecule that is selected from the group consisting of: (1) CD27; (2) CD28; (3) 4-1BB; (4) OX40; (5) CD30; (6) CD40; (7) PD-1; (8) ICOS; (9) LFA-1; (10) CD2; (11) CD7; (12) LIGHT; (13) NKG2C; (14) B7-H3; and combinations thereof. In an aspect, the CAR comprises one ITAM signaling domain, a first co-stimulatory domain, and a second co-stimulatory domain. In an aspect, the CAR comprises a first generation, a second generation, or a third generation CAR. In an aspect, the extracellular membrane moiety comprises: (i) an Annexin V; (ii) an CD8a hinge region; (iii) a CD8a transmembrane domain: (iv) an intracellular domain that comprises a 4-1BB and CD3ξ; and (v) a truncated EGFR co-expressed from a P2A linker.

[0312] Disclosed herein is a CAR comprising the structure selected from the group consisting of: (i) A5-BBz-EGFRt; (ii) A5-28z-EGFRt; (iii) A5-28BBz-EGFRt; and any fragment or portions thereof. Disclosed herein is a CAR comprising SEQ ID NO: 1 and any fragment or portion thereof. Disclosed herein is a CAR comprising SEQ ID NO: 2 and any fragment or portion thereof. Disclosed herein is a CAR comprising SEQ ID NO: 3 and any fragment or portion thereof.

[0313] In an aspect, the CARs provided herein are expressed in a vector/vector system. In an aspect, the vector/vector system is selected from the group consisting of: (1) lentivirus; (2) retrovirus; (3) transposon-based plasmids such as sleeping beauty and piggyback that were introduced through electroporation; (4) mRNA encoding the CAR receptor that are electroporated into T cells; (5) nanoparticles targeted at T cells with mRNA or transposon-based plasmids; and combinations thereof. In an aspect, the CARs are expressed on an immune effector cell. In an aspect, the cell is selected from the group consisting of T cells, NK cells, or macrophages for cancer treatment. In an aspect, the cancer cells to be targeted are those the express PS cells on their surface but remain alive, which can occur in cytotoxic therapy (chemotherapy or radiotherapy)-treated or -untreated cancer cells.

[0314] Disclosed herein is a pharmaceutical composition comprising a CAR as in any of the preceding claims and a pharmaceutically acceptable excipient, diluent, and/or carrier.

[0315] Disclosed herein is a method for treating solid and/or liquid tumors in a subject, the method comprising administering to the subject a therapeutically effective amount of a CAR as in any of the preceding claims such that the solid and/or liquid tumors are treated. In an aspect, the CARs are expressed on an immune effector cell. In an aspect, the immune effector cell is selected from the group consisting of T cell, NK cell, macrophages and combinations thereof. In an aspect, tumor comprises a liquid tumor selected from the group consisting of lymphoma and leukemia. In an aspect, the tumor cells comprise metastatic cancer cells. In an aspect, the metastatic cancer cells are found the blood, lymphatic system, and/or peritoneal cavity.

| SEQ ID | | |
|---|---|---|
| NO. | Description of Sequence | Type |
| 1 | Annexin V-CAR version 1: A5-BBz-EGFRt | synthetic |
| 2 | Annexin V-CAR version 2: A5-28z-EGFRt | synthetic |
| 3 | Annexin V-CAR version 3: A5-28BBz-EGFRt | synthetic |
| 4 | P2A//signal//tEGFR | synthetic |
| 5 | Annexin V-CAR version 1: A5-BBz-EGFRt | synthetic |
| | (w/o EGFR) | |
| 6 | Annexin V-CAR version 2: A5-28z-EGFRt | synthetic |
| | (w/o EGFR) | |
| 7 | Annexin V-CAR version 3: A5-28BBz-EGFRt | synthetic |
| | (w/o EGFR) | |
| 8 | CD8 signal peptide | synthetic |
| 9 | CD8α hinge domain | synthetic |
| 10 | CD8α transmembrane domain | synthetic |
| 11 | CD28 intracellular domain | synthetic |
| 12 | CD28a transmembrane domain | synthetic |
| 13 | 4-1BB intracellular domain | synthetic |
| 14 | CD3z intracellular domain | synthetic |
| 15 | P2A Cleaving Peptide | synthetic |
| 16 | Signal peptide (SP) | synthetic |
| 17 | EGFR | human protein |
| 18 | Truncated EGFR | human protein |
| 19 | ANXA1 | human protein |
| 20 | ANXA1 (PS Binding Domain of 41-346) | human protein |
| 21 | ANXA2 | human protein |
| 22 | ANXA3 | human protein |
| 23 | ANXA4 | human protein |
| 24 | ANXA5 | human protein |
| 25 | ANXA6 | human protein |
| 26 | ANXA7 | human protein |
| 27 | ANXA8 | human protein |
| 28 | ANXA8L1 | human protein |
| 29 | ANXA9 | human protein |
| 30 | ANXA10 | human protein |
| 31 | ANXA11 | human protein |
| 32 | ANXA13 | human protein |
| 33 | ADGRB1 (BAI1) | human protein |
| 34 | ADGRB1 (BAI) (extracellular domain 31-948) | human protein |
| 35 | Apolipoprotein H (Beta-2-Glycoprotein I) | human protein |
| 36 | Coagulation Factor II | human protein |
| 37 | Coagulation Factor VII | human protein |
| 38 | Coagulation Factor IX | human protein |
| 39 | Coagulation Factor X | human protein |
| 40 | Growth Arrest Specific 6 | human protein |
| 41 | Milk Fat Globule EGF and Factor V/VIII | human protein |
| | Domain Containing (MFG-E8) (Lactadherin) | |
| 42 | AGER/RAGE | human protein |
| 43 | AGER/RAGE (ExD 23-342) | human protein |
| 44 | Protein S | human protein |
| 45 | Stabilin 1 | human protein |
| 46 | Stabilin 1 (ExD 26-2478) | human protein |
| 47 | Stabilin 2 | human protein |
| 48 | Stabilin 2 (ExD 20-2458) | human protein |
| 49 | Hepatitis A Virus Cellular Receptor 1/TIM1 | human protein |
| 50 | Hepatitis A Virus Cellular Receptor 1/TIM1 | human protein |
| | (ExD 21-295) | |
| 51 | Hepatitis A Virus Cellular Receptor 2/TIM3 | human protein |
| 52 | Hepatitis A Virus Cellular Receptor 2/TIM3 | human protein |
| | (Ex 22-202) | |
| 53 | T Cell Immunoglobulin And Mucin Domain | human protein |
| | Containing (TIMD4) | |
| 54 | T Cell Immunoglobulin And Mucin Domain | human protein |
| | Containing/TIMD4 (Extracellular Domain | |
| | 25-314) | |
| 55 | Protein Kinase C Alpha | human protein |
| 56 | Protein Kinase C Alpha (C2 domain 158-275) | human protein |
| 57 | Synaptotagmin (SYT1) | human protein |
| 58 | Synaptotagmin (C2A domain 142-261) | human protein |
| 59 | Jumonji Domain Containing 6, Arginine | human protein |
| | Demethylase and Lysine Hydrolase (JMJD6) | |
| 60 | Annexin A1 | human genomic |
| 61 | Annexin A2 | human genomic |
| 62 | Annexin A3 | human genomic |
| 63 | Annexin A4 | human genomic |
| 64 | Annexin A5 | human genomic |
| 65 | Annexin A6 | human genomic |
| 66 | Annexin A7 | human genomic |
| 67 | Annexin A8 (human genomic)v Annexin A8 | human genomic |
| 68 | Annexin A8L1 | human genomic |
| 69 | Annexin A9 | human genomic |
| 70 | Annexin A10 | human genomic |
| 71 | Annexin A11 | human genomic |
| 72 | Annexin A13 | human genomic |
| 73 | scFV of Bavitixumab | synthetic |
| 74 | Annexin A1 (mRNA - NM_000700.3) | human |
| 75 | Annexin A2 (mRNA transcript 1 - NM_001002858.3) | human |
| 76 | Annexin A2 (mRNA transcript 2 - NM_001002857.2) | human |
| 77 | Annexin A3 (mRNA transcript - NM_005139.3) | human |
| 78 | Annexin A4 (mRNA transcript 1 - NM_001320698.2) | human |
| 79 | Annexin A4 (mRNA transcript 2 - NM_001153.5) | human |
| 80 | Annexin A4 (mRNA transcript 3 - NM_001320700.2) | human |
| 81 | Annexin A4 (mRNA transcript 4 - NM_001320702.2) | human |
| 82 | Annexin A5 (mRNA - NM_001154.4) | human |
| 83 | Annexin A6 (mRNA transcript 1 - NM_001155.5) | human |
| 84 | Annexin A6 (mRNA transcript 2 - NM_001193544.2) | human |
| 85 | Annexin A6 (mRNA transcript 3 - NM_001363114.2) | human |
| 86 | Annexin A7 (mRNA transcript 1 - NM_001156.5) | human |
| 87 | Annexin A7 (mRNA transcript 2 - NM_0044.4) | human |
| 88 | Annexin A7 (mRNA transcript 3 - NM_001320880.2) | human |
| 89 | Annexin A7 (mRNA transcript 4 - NM_001320879.2) | human |
| 90 | Annexin A8 (mRNA transcript 1 - NM_001271702.2) | human |
| 91 | Annexin A8 (mRNA transcript 2 - NM_001040084.3) | human |
| 92 | Annexin A8 (mRNA transcript 3 - NM_0012717.2) | human |
| 93 | Annexin A8L1 (mRNA transcript 1 - NM_001098845.3) | human |
| 94 | Annexin A8L1 (mRNA transcript 2 - NM_001278924.2) | human |
| 95 | Annexin A8L1 (mRNA transcript 3 - NM_001278923.2 | human |
| 96 | Annexin A9 (mRNA transcript - NM_0568.3) | human |
| 97 | Annexin 10 (mRNA transcript 1 - NM_007193.5) | human |
| 98 | Annexin A11 (mRNA transcript a - NM_001157.3) | human |
| 99 | Annexin A11 (mRNA transcript b - NM_001278409.2) | human |
| 100 | Annexin A13 (mRNA transcript a - NM_004306.4) | human |
| 101 | Annexin A13 (mRNA transcript b - NM_0010954.3) | human |
| 102 | P2A Cleaving Peptide with Optional Linker | synthetic |
| 103 | T2A Cleaving Peptide | synthetic |
| 104 | T2A Cleaving Peptide with Optional Linker | synthetic |
| 105 | E2A Cleaving Peptide | synthetic |
| 106 | E2A Cleaving Peptide with Optional Linker | synthetic |
| 107 | F2A Cleaving Peptide | synthetic |
| 108 | F2A Cleaving Peptide with Optional Linker | synthetic |

### EXAMPLES

[0316] Most of the current paradigms for cancer therapy assume that PS-expressing tumor cells, either from exposure to internal or external stressors, are destined to die from apoptosis. But data provided herein showed that some of these PS-expressing tumor cells survived. As detailed herein, the compositions and methods described herein can significantly enhance the success rate of conventional cytotoxic cancer therapy. The Examples that follow are illustrative of specific aspects of the invention, and various uses thereof. They set forth for explanatory purposes only and are not to be taken as limiting the invention.

### Example 1

### Examination of Survival of Phosphatidylserine-Positive Tumor Cells

[0317] To determine whether cells expressing high-level of PS expression on the cell surface were destined to die, the viability of c1498 murine AML (Acute Myeloid Leukemia) cells treated with cytarabine (part of a classical chemotherapy regimen for human AML) was examined.

[0318] Specifically, whether PS-expressing acute myelocytic leukemia (AML) cells survived was examined. FACS was used to identify and sort c1498 cells treated with 1 μM cytarabine (for 24 hrs) and with high PS-expression. The sorted cells were then seeded into 6-well dishes and the ability to survive and proliferate was measured. FIG. 1A-FIG. 1B). The data indicated the following: (i) about 22-25% of untreated c1498 cells that were either PS+7AAD-(7AAD is a fluorescent dye used to detect membrane integrity), early apoptotic cells, or PS+7AAD+, late apoptotic cells, remained alive and could proliferate in a robust manner (FIG. 1C), and (ii) about 25% or 8% of cytarabine-treated PS+7AAD-c1498 cells or PS+7AAD+c1498 cells, respectively, remained viable and could proliferate (FIG. 1C). These results indicated that a substantial proportion of PS+ cells survived the initiation of the apoptotic process, which is different from the prevailing view that PS+ cells are destined to die.

### Example 2

### Annexin V-CAR Transduced T-Cell Mediated Killing of Human AML Cells Chemotherapy Treatment In Vitro

[0319] To evaluate PS-targeting CAR-T cells'' abilities to kill cancer cells, Annexin V-CAR (Annexin V-BBz)-transduced T cells were evaluated. CAR-T cells were co-cultured with 4 different AML cells: MV4-11, HL60, KG-1a, and U937. These cells were genetically transduced with the firefly luciferase (Fluc) gene. The efficacy of the CAR-T cells was evaluated by measuring the relative numbers of the tumor cells after 24 hrs of co-culture, through measuring Fluc activities of the surviving cells by administering luciferin, a chemical substrate of Fluc. In all 4 cells, the CAR-T cells had potent abilities to kill the tumor cells, especially at low tumor: T cell ratios (FIG. 2).

### Example 3

### Annexin V-CAR Transduced T-Cell Mediated Killing of Human AML Cells Chemotherapy Treatment In Vivo

[0320] The ability of the annexin V-CAR transduced T cells to suppress tumor growth in vivo was evaluated. Subcutaneous KG1a AML tumors were established by injecting 2×10⁶ KG-la cells subcutaneously. Then, 6 days later, 1×10⁷ Annexin V-CAR transduced T cells were injected intravenously. Tumor dimensions were then measured by using a caliper. The data indicated that Annexin V-CAR transduced cells significantly suppressed KG-1a tumor growth (FIG. 3). Tumor volume were calculated as: V (tumor)=(π/6)*(L)*(S) 2, V=tumor volume, π=3.14, L: longest dimension of the tumor, and S=shortest dimension of the tumor.

### Summary of Specific Example

[0321] As demonstrated herein, genetically modified immune effector cells (T, NK, NKT, or macrophages) expressing a PS-targeting chimeric antigen receptor can eliminate PS-expressing tumor cells. The examples provided herein demonstrated that PS-expressing tumor cells, occurring either spontaneously or after exposure to cytotoxic chemotherapeutic agents, could survive and proliferate, indicating that these cells are important therapeutic targets that must be eliminated for cancer therapy to be successful. Because the art has previously discounted the significance of PS-expressing tumor cells, there are no current therapeutics that can effectively target these tumor cells. The examples provided herein conclusively demonstrate that the disclosed CAR-modified T cells (or NK cells or macrophages) effectively killed PS⁺ tumor cells both in vitro and in vivo. Furthermore, because cell surface PS expression is a dynamic process for treated tumor cells, PS-negative tumor cells likely become PS-positive in a stochastic manner. For this reason, the disclosed PS-targeting CAR-T cells can kill a significant number of PS-negative cancer cells.

The application's sequence listing, which the Patent Office published only in electronic form, follows.

SEQUENCE LISTING (108 sequences)

SEQ ID NO: 1 - protein, 943 aa, synthetic construct
MALPVTALLLPLALLLHAARPAQVLRGTVTDFPGFDERADAETLRKAMKGLGTDEESILTLLTSRSNAQRQEISAAFKTLFGRDLLDDLKSELTGKFEKLIVALMKPSRLYDAYELKHALKGAGTNEKVLTEIIASRTPEELRAIKQVYEEEYGSSLEDDVVGDTSGYYQRMLVVLLQANRDPDAGIDEAQVEQDAQALFQAGELKWGTDEEKFITIFGTRSVSHLRKVFDKYMTISGFQIEETIDRETSGNLEQLLLAVVKSIRSIPAYLAETLYYAMKGAGTDDHTLIRVMVSRSEIDLFNIRKEFRKNFATSLYSMIKGDTSGDYKKALLLLCGEDDTTTPAPRPPTPAPTIASQPLSLRPEACRPAAGGAVHTRGLDFACDIYIWAPLAGTCGVLLLSLVITLYKRGRKKLLYIFKQPFMRPVQTTQEEDGCSCRFPEEEEGGCELRVKFSRSADAPAYKQGQNQLYNELNLGRREEYDVLDKRRGRDPEMGGKPRRKNPQEGLYNELQKDKMAEAYSEIGMKGERRRGKGHDGLYQGLSTATKDTYDALHMQALPPRLEGGGEGRGSLLTCGDVEENPGPRMLLLVTSLLLCELPHPAFLLIPRKVCNGIGIGEFKDSLSINATNIKHFKNCTSISGDLHILPVAFRGDSFTHTPPLDPQELDILKTVKEITGFLLIQAWPENRTDLHAFENLEIIRGRTKQHGQFSLAVVSLNITSLGLRSLKEISDGDVIISGNKNLCYANTINWKKLFGTSGQKTKIISNRGENSCKATGQVCHALCSPEGCWGPEPRDCVSCRNVSRGRECVDKCNLLEGEPREFVENSECIQCHPECLPQAMNITCTGRGPDNCIQCAHYIDGPHCVKTCPAGVMGENNTLVWKYADAGHVCHLCHPNCTYGCTGPGLEGCPTNGPKIPSIATGMVGALLLLLVVALGIGLFM

SEQ ID NO: 2 - protein, 948 aa, synthetic construct
MALPVTALLLPLALLLHAARPAQVLRGTVTDFPGFDERADAETLRKAMKGLGTDEESILTLLTSRSNAQRQEISAAFKTLFGRDLLDDLKSELTGKFEKLIVALMKPSRLYDAYELKHALKGAGTNEKVLTEIIASRTPEELRAIKQVYEEEYGSSLEDDVVGDTSGYYQRMLVVLLQANRDPDAGIDEAQVEQDAQALFQAGELKWGTDEEKFITIFGTRSVSHLRKVFDKYMTISGFQIEETIDRETSGNLEQLLLAVVKSIRSIPAYLAETLYYAMKGAGTDDHTLIRVMVSRSEIDLFNIRKEFRKNFATSLYSMIKGDTSGDYKKALLLLCGEDDTTTPAPRPPTPAPTIASQPLSLRPEACRPAAGGAVHTRGLDFACDIYFWVLVVVGGVLACYSLLVTVAFIIFWVRSKRSRGGHSDYMNMTPRRPGPTRKHYQPYAPPRDFAAYRSRVKFSRSADAPAYKQGQNQLYNELNLGRREEYDVLDKRRGRDPEMGGKPRRKNPQEGLYNELQKDKMAEAYSEIGMKGERRRGKGHDGLYQGLSTATKDTYDALHMQALPPRLEGGGEGRGSLLTCGDVEENPGPRMLLLVTSLLLCELPHPAFLLIPRKVCNGIGIGEFKDSLSINATNIKHFKNCTSISGDLHILPVAFRGDSFTHTPPLDPQELDILKTVKEITGFLLIQAWPENRTDLHAFENLEIIRGRTKQHGQFSLAVVSLNITSLGLRSLKEISDGDVIISGNKNLCYANTINWKKLFGTSGQKTKIISNRGENSCKATGQVCHALCSPEGCWGPEPRDCVSCRNVSRGRECVDKCNLLEGEPREFVENSECIQCHPECLPQAMNITCTGRGPDNCIQCAHYIDGPHCVKTCPAGVMGENNTLVWKYADAGHVCHLCHPNCTYGCTGPGLEGCPTNGPKIPSIATGMVGALLLLLVVALGIGLFM

SEQ ID NO: 3 - protein, 990 aa, synthetic construct
MALPVTALLLPLALLLHAARPAQVLRGTVTDFPGFDERADAETLRKAMKGLGTDEESILTLLTSRSNAQRQEISAAFKTLFGRDLLDDLKSELTGKFEKLIVALMKPSRLYDAYELKHALKGAGTNEKVLTEIIASRTPEELRAIKQVYEEEYGSSLEDDVVGDTSGYYQRMLVVLLQANRDPDAGIDEAQVEQDAQALFQAGELKWGTDEEKFITIFGTRSVSHLRKVFDKYMTISGFQIEETIDRETSGNLEQLLLAVVKSIRSIPAYLAETLYYAMKGAGTDDHTLIRVMVSRSEIDLFNIRKEFRKNFATSLYSMIKGDTSGDYKKALLLLCGEDDTTTPAPRPPTPAPTIASQPLSLRPEACRPAAGGAVHTRGLDFACDIYFWVLVVVGGVLACYSLLVTVAFIIFWVRSKRSRGGHSDYMNMTPRRPGPTRKHYQPYAPPRDFAAYRSKRGRKKLLYIFKQPFMRPVQTTQEEDGCSCRFPEEEEGGCELRVKFSRSADAPAYKQGQNQLYNELNLGRREEYDVLDKRRGRDPEMGGKPRRKNPQEGLYNELQKDKMAEAYSEIGMKGERRRGKGHDGLYQGLSTATKDTYDALHMQALPPRLEGGGEGRGSLLTCGDVEENPGPRMLLLVTSLLLCELPHPAFLLIPRKVCNGIGIGEFKDSLSINATNIKHFKNCTSISGDLHILPVAFRGDSFTHTPPLDPQELDILKTVKEITGFLLIQAWPENRTDLHAFENLEIIRGRTKQHGQFSLAVVSLNITSLGLRSLKEISDGDVIISGNKNLCYANTINWKKLFGTSGQKTKIISNRGENSCKATGQVCHALCSPEGCWGPEPRDCVSCRNVSRGRECVDKCNLLEGEPREFVENSECIQCHPECLPQAMNITCTGRGPDNCIQCAHYIDGPHCVKTCPAGVMGENNTLVWKYADAGHVCHLCHPNCTYGCTGPGLEGCPTNGPKIPSIATGMVGALLLLLVVALGIGLFM

SEQ ID NO: 4 - protein, 381 aa, synthetic construct
LEGGGEGRGSLLTCGDVEENPGPRMLLLVTSLLLCELPHPAFLLIPRKVCNGIGIGEFKDSLSINATNIKHFKNCTSISGDLHILPVAFRGDSFTHTPPLDPQELDILKTVKEITGFLLIQAWPENRTDLHAFENLEIIRGRTKQHGQFSLAVVSLNITSLGLRSLKEISDGDVIISGNKNLCYANTINWKKLFGTSGQKTKIISNRGENSCKATGQVCHALCSPEGCWGPEPRDCVSCRNVSRGRECVDKCNLLEGEPREFVENSECIQCHPECLPQAMNITCTGRGPDNCIQCAHYIDGPHCVKTCPAGVMGENNTLVWKYADAGHVCHLCHPNCTYGCTGPGLEGCPTNGPKIPSIATGMVGALLLLLVVALGIGLFM

SEQ ID NO: 5 - protein, 562 aa, synthetic construct
MALPVTALLLPLALLLHAARPAQVLRGTVTDFPGFDERADAETLRKAMKGLGTDEESILTLLTSRSNAQRQEISAAFKTLFGRDLLDDLKSELTGKFEKLIVALMKPSRLYDAYELKHALKGAGTNEKVLTEIIASRTPEELRAIKQVYEEEYGSSLEDDVVGDTSGYYQRMLVVLLQANRDPDAGIDEAQVEQDAQALFQAGELKWGTDEEKFITIFGTRSVSHLRKVFDKYMTISGFQIEETIDRETSGNLEQLLLAVVKSIRSIPAYLAETLYYAMKGAGTDDHTLIRVMVSRSEIDLFNIRKEFRKNFATSLYSMIKGDTSGDYKKALLLLCGEDDTTTPAPRPPTPAPTIASQPLSLRPEACRPAAGGAVHTRGLDFACDIYIWAPLAGTCGVLLLSLVITLYKRGRKKLLYIFKQPFMRPVQTTQEEDGCSCRFPEEEEGGCELRVKFSRSADAPAYKQGQNQLYNELNLGRREEYDVLDKRRGRDPEMGGKPRRKNPQEGLYNELQKDKMAEAYSEIGMKGERRRGKGHDGLYQGLSTATKDTYDALHMQALPPR

SEQ ID NO: 6 - protein, 567 aa, synthetic construct
MALPVTALLLPLALLLHAARPAQVLRGTVTDFPGFDERADAETLRKAMKGLGTDEESILTLLTSRSNAQRQEISAAFKTLFGRDLLDDLKSELTGKFEKLIVALMKPSRLYDAYELKHALKGAGTNEKVLTEIIASRTPEELRAIKQVYEEEYGSSLEDDVVGDTSGYYQRMLVVLLQANRDPDAGIDEAQVEQDAQALFQAGELKWGTDEEKFITIFGTRSVSHLRKVFDKYMTISGFQIEETIDRETSGNLEQLLLAVVKSIRSIPAYLAETLYYAMKGAGTDDHTLIRVMVSRSEIDLFNIRKEFRKNFATSLYSMIKGDTSGDYKKALLLLCGEDDTTTPAPRPPTPAPTIASQPLSLRPEACRPAAGGAVHTRGLDFACDIYFWVLVVVGGVLACYSLLVTVAFIIFWVRSKRSRGGHSDYMNMTPRRPGPTRKHYQPYAPPRDFAAYRSRVKFSRSADAPAYKQGQNQLYNELNLGRREEYDVLDKRRGRDPEMGGKPRRKNPQEGLYNELQKDKMAEAYSEIGMKGERRRGKGHDGLYQGLSTATKDTYDALHMQALPPR

SEQ ID NO: 7 - protein, 609 aa, synthetic construct
MALPVTALLLPLALLLHAARPAQVLRGTVTDFPGFDERADAETLRKAMKGLGTDEESILTLLTSRSNAQRQEISAAFKTLFGRDLLDDLKSELTGKFEKLIVALMKPSRLYDAYELKHALKGAGTNEKVLTEIIASRTPEELRAIKQVYEEEYGSSLEDDVVGDTSGYYQRMLVVLLQANRDPDAGIDEAQVEQDAQALFQAGELKWGTDEEKFITIFGTRSVSHLRKVFDKYMTISGFQIEETIDRETSGNLEQLLLAVVKSIRSIPAYLAETLYYAMKGAGTDDHTLIRVMVSRSEIDLFNIRKEFRKNFATSLYSMIKGDTSGDYKKALLLLCGEDDTTTPAPRPPTPAPTIASQPLSLRPEACRPAAGGAVHTRGLDFACDIYFWVLVVVGGVLACYSLLVTVAFIIFWVRSKRSRGGHSDYMNMTPRRPGPTRKHYQPYAPPRDFAAYRSKRGRKKLLYIFKQPFMRPVQTTQEEDGCSCRFPEEEEGGCELRVKFSRSADAPAYKQGQNQLYNELNLGRREEYDVLDKRRGRDPEMGGKPRRKNPQEGLYNELQKDKMAEAYSEIGMKGERRRGKGHDGLYQGLSTATKDTYDALHMQALPPR

SEQ ID NO: 8 - protein, 21 aa, synthetic construct
MALPVTALLLPLALLLHAARP

SEQ ID NO: 9 - protein, 47 aa, synthetic construct
TTTPAPRPPTPAPTIASQPLSLRPEACRPAAGGAVHTRGLDFACDIY

SEQ ID NO: 10 - protein, 21 aa, synthetic construct
IWAPLAGTCGVLLLSLVITLY

SEQ ID NO: 11 - protein, 41 aa, synthetic construct
RSKRSRGGHSDYMNMTPRRPGPTRKHYQPYAPPRDFAAYRS

SEQ ID NO: 12 - protein, 27 aa, synthetic construct
FWVLVVVGGVLACYSLLVTVAFIIFWV

SEQ ID NO: 13 - protein, 42 aa, synthetic construct
KRGRKKLLYIFKQPFMRPVQTTQEEDGCSCRFPEEEEGGCEL

SEQ ID NO: 14 - protein, 112 aa, synthetic construct
RVKFSRSADAPAYKQGQNQLYNELNLGRREEYDVLDKRRGRDPEMGGKPRRKNPQEGLYNELQKDKMAEAYSEIGMKGERRRGKGHDGLYQGLSTATKDTYDALHMQALPPR

SEQ ID NO: 15 - protein, 24 aa, synthetic construct
LEGGGEGRGSLLTCGDVEENPGPR

SEQ ID NO: 16 - protein, 22 aa, synthetic construct
MLLLVTSLLLCELPHPAFLLIP

SEQ ID NO: 17 - protein, 1210 aa, Homo sapiens [sequence omitted]

SEQ ID NO: 18 - protein, 335 aa, Homo sapiens
RKVCNGIGIGEFKDSLSINATNIKHFKNCTSISGDLHILPVAFRGDSFTHTPPLDPQELDILKTVKEITGFLLIQAWPENRTDLHAFENLEIIRGRTKQHGQFSLAVVSLNITSLGLRSLKEISDGDVIISGNKNLCYANTINWKKLFGTSGQKTKIISNRGENSCKATGQVCHALCSPEGCWGPEPRDCVSCRNVSRGRECVDKCNLLEGEPREFVENSECIQCHPECLPQAMNITCTGRGPDNCIQCAHYIDGPHCVKTCPAGVMGENNTLVWKYADAGHVCHLCHPNCTYGCTGPGLEGCPTNGPKIPSIATGMVGALLLLLVVALGIGLFM

SEQ ID NO: 19 - protein, 346 aa, Homo sapiens
MAMVSEFLKQAWFIENEEQEYVQTVKSSKGGPGSAVSPYPTFNPSSDVAALHKAIMVKGVDEATIIDILTKRNNAQRQQIKAAYLQETGKPLDETLKKALTGHLEEVVLALLKTPAQFDADELRAAMKGLGTDEDTLIEILASRTNKEIRDINRVYREELKRDLAKDITSDTSGDFRNALLSLAKGDRSEDFGVNEDLADSDARALYEAGERRKGTDVNVFNTILTTRSYPQLRRVFQKYTKYSKHDMNKVLDLELKGDIEKCLTAIVKCATSKPAFFAEKLHQAMKGVGTRHKALIRIMVSRSEIDMNDIKAFYQKMYGISLCQAILDETKGDYEKILVALCGGN

SEQ ID NO: 20 - protein, 306 aa, Homo sapiens
TFNPSSDVAALHKAIMVKGVDEATIIDILTKRNNAQRQQIKAAYLQETGKPLDETLKKALTGHLEEVVLALLKTPAQFDADELRAAMKGLGTDEDTLIEILASRTNKEIRDINRVYREELKRDLAKDITSDTSGDFRNALLSLAKGDRSEDFGVNEDLADSDARALYEAGERRKGTDVNVFNTILTTRSYPQLRRVFQKYTKYSKHDMNKVLDLELKGDIEKCLTAIVKCATSKPAFFAEKLHQAMKGVGTRHKALIRIMVSRSEIDMNDIKAFYQKMYGISLCQAILDETKGDYEKILVALCGGN

SEQ ID NO: 21 - protein, 339 aa, Homo sapiens
MSTVHEILCKLSLEGDHSTPPSAYGSVKAYTNFDAERDALNIETAIKTKGVDEVTIVNILTNRSNAQRQDIAFAYQRRTKKELASALKSALSGHLETVILGLLKTPAQYDASELKASMKGLGTDEDSLIEIICSRTNQELQEINRVYKEMYKTDLEKDIISDTSGDFRKLMVALAKGRRAEDGSVIDYELIDQDARDLYDAGVKRKGTDVPKWISIMTERSVPHLQKVFDRYKSYSPYDMLESIRKEVKGDLENAFLNLVQCIQNKPLYFADRLYDSMKGKGTRDKVLIRIMVSRSEVDMLKIRSEFKRKYGKSLYYYIQQDTKGDYQKALLYLCGGDD

SEQ ID NO: 22 - protein, 323 aa, Homo sapiens
MASIWVGHRGTVRDYPDFSPSVDAEAIQKAIRGIGTDEKMLISILTERSNAQRQLIVKEYQAAYGKELKDDLKGDLSGHFEHLMVALVTPPAVFDAKQLKKSMKGAGTNEDALIEILTTRTSRQMKDISQAYYTVYKKSLGDDISSETSGDFRKALLTLADGRRDESLKVDEHLAKQDAQILYKAGENRWGTDEDKFTEILCLRSFPQLKLTFDEYRNISQKDIVDSIKGELSGHFEDLLLAIVNCVRNTPAFLAERLHRALKGIGTDEFTLNRIMVSRSEIDLLDIRTEFKKHYGYSLYSAIKSDTSGDYEITLLKICGGDD

SEQ ID NO: 23 - protein, 319 aa, Homo sapiens
MATKGGTVKAASGFNAMEDAQTLRKAMKGLGTDEDAIISVLAYRNTAQRQEIRTAYKSTIGRDLIDDLKSELSGNFEQVIVGMMTPTVLYDVQELRRAMKGAGTDEGCLIEILASRTPEEIRRISQTYQQQYGRSLEDDIRSDTSFMFQRVLVSLSAGGRDEGNYLDDALVRQDAQDLYEAGEKKWGTDEVKFLTVLCSRNRNHLLHVFDEYKRISQKDIEQSIKSETSGSFEDALLAIVKCMRNKSAYFAEKLYKSMKGLGTDDNTLIRVMVSRAEIDMLDIRAHFKRLYGKSLYSFIKGDTSGDYRKVLLVLCGGDD

SEQ ID NO: 24 - protein, 320 aa, Homo sapiens
MAQVLRGTVTDFPGFDERADAETLRKAMKGLGTDEESILTLLTSRSNAQRQEISAAFKTLFGRDLLDDLKSELTGKFEKLIVALMKPSRLYDAYELKHALKGAGTNEKVLTEIIASRTPEELRAIKQVYEEEYGSSLEDDVVGDTSGYYQRMLVVLLQANRDPDAGIDEAQVEQDAQALFQAGELKWGTDEEKFITIFGTRSVSHLRKVFDKYMTISGFQIEETIDRETSGNLEQLLLAVVKSIRSIPAYLAETLYYAMKGAGTDDHTLIRVMVSRSEIDLFNIRKEFRKNFATSLYSMIKGDTSGDYKKALLLLCGEDD

SEQ ID NO: 25 - protein, 673 aa, Homo sapiens
MAKPAQGAKYRGSIHDFPGFDPNQDAEALYTAMKGFGSDKEAILDIITSRSNRQRQEVCQSYKSLYGKDLIADLKYELTGKFERLIVGLMRPPAYCDAKEIKDAISGIGTDEKCLIEILASRTNEQMHQLVAAYKDAYERDLEADIIGDTSGHFQKMLVVLLQGTREEDDVVSEDLVQQDVQDLYEAGELKWGTDEAQFIYILGNRSKQHLRLVFDEYLKTTGKPIEASIRGELSGDFEKLMLAVVKCIRSTPEYFAERLFKAMKGLGTRDNTLIRIMVSRSELDMLDIREIFRTKYEKSLYSMIKNDTSGEYKKTLLKLSGGDDDAAGQFFPEAAQVAYQMWELSAVARVELKGTVRPANDFNPDADAKALRKAMKGLGTDEDTIIDIITHRSNVQRQQIRQTFKSHFGRDLMTDLKSEISGDLARLILGLMMPPAHYDAKQLKKAMEGAGTDEKALIEILATRTNAEIRAINEAYKEDYHKSLEDALSSDTSGHFRRILISLATGHREEGGENLDQAREDAQVAAEILEIADTPSGDKTSLETRFMTILCTRSYPHLRRVFQEFIKMTNYDVEHTIKKEMSGDVRDAFVAIVQSVKNKPLFFADKLYKSMKGAGTDEKTLTRIMVSRSEIDLLNIRREFIEKYDKSLHQAIEGDTSGDFLKALLALCGGED

SEQ ID NO: 26 - protein, 488 aa, Homo sapiens
MSYPGYPPTGYPPFPGYPPAGQESSFPPSGQYPYPSGFPPMGGGAYPQVPSSGYPGAGGYPAPGGYPAPGGYPGAPQPGGAPSYPGVPPGQGFGVPPGGAGFSGYPQPPSQSYGGGPAQVPLPGGFPGGQMPSQYPGGQPTYPSQINTDSFSSYPVFSPVSLDYSSEPATVTQVTQGTIRPAANFDAIRDAEILRKAMKGFGTDEQAIVDVVANRSNDQRQKIKAAFKTSYGKDLIKDLKSELSGNMEELILALFMPPTYYDAWSLRKAMQGAGTQERVLIEILCTRTNQEIREIVRCYQSEFGRDLEKDIRSDTSGHFERLLVSMCQGNRDENQSINHQMAQEDAQRLYQAGEGRLGTDESCFNMILATRSFPQLRATMEAYSRMANRDLLSSVSREFSGYVESGLKTILQCALNRPAFFAERLYYAMKGAGTDDSTLVRIVVTRSEIDLVQIKQMFAQMYQKTLGTMIAGDTSGDYRRLLLAIVGQ

SEQ ID NO: 27 - protein, 327 aa, Homo sapiens
MAWWKSWIEQEGVTVKSSSHFNPDPDAETLYKAMKGIGTNEQAIIDVLTKRSNTQRQQIAKSFKAQFGKDLTETLKSELSGKFERLIVALMYPPYRYEAKELHDAMKGLGTKEGVIIEILASRTKNQLREIMKAYEEDYGSSLEEDIQADTSGYLERILVCLLQGSRDDVSSFVDPGLALQDAQDLYAAGEKIRGTDEMKFITILCTRSATHLLRVFEEYEKIANKSIEDSIKSETHGSLEEAMLTVVKCTQNLHSYFAERLYYAMKGAGTRDGTLIRNIVSRSEIDLNLIKCHFKKMYGKTLSSMIMEDTSGDYKNALLSLVGSDP

SEQ ID NO: 28 - protein, 327 aa, Homo sapiens
MAWWKAWIEQEGVTVKSSSHFNPDPDAETLYKAMKGIGTNEQAIIDVLTKRSNTQRQQIAKSFKAQFGKDLTETLKSELSGKFERLIVALMYPPYRYEAKELHDAMKGLGTKEGVIIEILASRTKNQLREIMKAYEEDYGSSLEEDIQADTSGYLERILVCLLQGSRDDVSSFVDPALALQDAQDLYAAGEKIRGTDEMKFITILCTRSATHLLRVFEEYEKIANKSIEDSIKSETHGSLEEAMLTVVKCTQNLHSYFAERLYYAMKGAGTRDGTLIRNIVSRSEIDLNLIKCHFKKMYGKTLSSMIMEDTSGDYKNALLSLVGSDP

SEQ ID NO: 29 - protein, 345 aa, Homo sapiens
MSVTGGKMAPSLTQEILSHLGLASKTAAWGTLGTLRTFLNFSVDKDAQRLLRAITGQGVDRSAIVDVLTNRSREQRQLISRNFQERTQQDLMKSLQAALSGNLERIVMALLQPTAQFDAQELRTALKASDSAVDVAIEILATRTPPQLQECLAVYKHNFQVEAVDDITSETSGILQDLLLALAKGGRDSYSGIIDYNLAEQDVQALQRAEGPSREETWVPVFTQRNPEHLIRVFDQYQRSTGQELEEAVQNRFHGDAQVALLGLASVIKNTPLYFADKLHQALQETEPNYQVLIRILISRCETDLLSIRAEFRKKFGKSLYSSLQDAVKGDCQSALLALCRAEDM

SEQ ID NO: 30 - protein, 324 aa, Homo sapiens
MFCGDYVQGTIFPAPNFNPIMDAQMLGGALQGFDCDKDMLINILTQRCNAQRMMIAEAYQSMYGRDLIGDMREQLSDHFKDVMAGLMYPPPLYDAHELWHAMKGVGTDENCLIEILASRTNGEIFQMREAYCLQYSNNLQEDIYSETSGHFRDTLMNLVQGTREEGYTDPAMAAQDAMVLWEACQQKTGEHKTMLQMILCNKSYQQLRLVFQEFQNISGQDMVDAINECYDGYFQELLVAIVLCVRDKPAYFAYRLYSAIHDFGFHNKTVIRILIARSEIDLLTIRKRYKERYGKSLFHDIRNFASGHYKKALLAICAGDAEDY

SEQ ID NO: 31 - protein, 505 aa, Homo sapiens
MSYPGYPPPPGGYPPAAPGGGPWGGAAYPPPPSMPPIGLDNVATYAGQFNQDYLSGMAANMSGTFGGANMPNLYPGAPGAGYPPVPPGGFGQPPSAQQPVPPYGMYPPPGGNPPSRMPSYPPYPGAPVPGQPMPPPGQQPPGAYPGQPPVTYPGQPPVPLPGQQQPVPSYPGYPGSGTVTPAVPPTQFGSRGTITDAPGFDPLRDAEVLRKAMKGFGTDEQAIIDCLGSRSNKQRQQILLSFKTAYGKDLIKDLKSELSGNFEKTILALMKTPVLFDIYEIKEAIKGVGTDEACLIEILASRSNEHIRELNRAYKAEFKKTLEEAIRSDTSGHFQRLLISLSQGNRDESTNVDMSLAQRDAQELYAAGENRLGTDESKFNAVLCSRSRAHLVAVFNEYQRMTGRDIEKSICREMSGDLEEGMLAVVKCLKNTPAFFAERLNKAMRGAGTKDRTLIRIMVSRSETDLLDIRSEYKRMYGKSLYHDISGDTSGDYRKILLKICGGND

SEQ ID NO: 32 - protein, 316 aa, Homo sapiens
MGNRHAKASSPQGFDVDRDAKKLNKACKGMGTNEAAIIEILSGRTSDERQQIKQKYKATYGKELEEVLKSELSGNFEKTALALLDRPSEYAARQLQKAMKGLGTDESVLIEVLCTRTNKEIIAIKEAYQRLFDRSLESDVKGDTSGNLKKILVSLLQANRNEGDDVDKDLAGQDAKDLYDAGEGRWGTDELAFNEVLAKRSYKQLRATFQAYQILIGKDIEEAIEEETSGDLQKAYLTLVRCAQDCEDYFAERLYKSMKGAGTDEETLIRIVVTRAEVDLQGIKAKFQEKYQKSLSDMVRSDTSGDFRKLLVALLH

SEQ ID NO: 33 - protein, 1584 aa, Homo sapiens
MRGQAAAPGPVWILAPLLLLLLLLGRRARAAAGADAGPGPEPCATLVQGKFFGYFSAAAVFPANASRCSWTLRNPDPRRYTLYMKVAKAPVPCSGPGRVRTYQFDSFLESTRTYLGVESFDEVLRLCDPSAPLAFLQASKQFLQMRRQQPPQHDGLRPRAGPPGPTDDFSVEYLVVGNRNPSRAACQMLCRWLDACLAGSRSSHPCGIMQTPCACLGGEAGGPAAGPLAPRGDVCLRDAVAGGPENCLTSLTQDRGGHGATGGWKLWSLWGECTRDCGGGLQTRTRTCLPAPGVEGGGCEGVLEEGRQCNREACGPAGRTSSRSQSLRSTDARRREELGDELQQFGFPAPQTGDPAAEEWSPWSVCSSTCGEGWQTRTRFCVSSSYSTQCSGPLREQRLCNNSAVCPVHGAWDEWSPWSLCSSTCGRGFRDRTRTCRPPQFGGNPCEGPEKQTKFCNIALCPGRAVDGNWNEWSSWSACSASCSQGRQQRTRECNGPSYGGAECQGHWVETRDCFLQQCPVDGKWQAWASWGSCSVTCGAGSQRRERVCSGPFFGGAACQGPQDEYRQCGTQRCPEPHEICDEDNFGAVIWKETPAGEVAAVRCPRNATGLILRRCELDEEGIAYWEPPTYIRCVSIDYRNIQMMTREHLAKAQRGLPGEGVSEVIQTLVEISQDGTSYSGDLLSTIDVLRNMTEIFRRAYYSPTPGDVQNFVQILSNLLAEENRDKWEEAQLAGPNAKELFRLVEDFVDVIGFRMKDLRDAYQVTDNLVLSIHKLPASGATDISFPMKGWRATGDWAKVPEDRVTVSKSVFSTGLTEADEASVFVVGTVLYRNLGSFLALQRNTTVLNSKVISVTVKPPPRSLRTPLEIEFAHMYNGTTNQTCILWDETDVPSSSAPPQLGPWSWRGCRTVPLDALRTRCLCDRLSTFAILAQLSADANMEKATLPSVTLIVGCGVSSLTLLMLVIIYVSVWRYIRSERSVILINFCLSIISSNALILIGQTQTRNKVVCTLVAAFLHFFFLSSFCWVLTEAWQSYMAVTGHLRNRLIRKRFLCLGWGLPALVVAISVGFTKAKGYSTMNYCWLSLEGGLLYAFVGPAAAVVLVNMVIGILVFNKLVSKDGITDKKLKERAGASLWSSCVVLPLLALTWMSAVLAVTDRRSALFQILFAVFDSLEGFVIVMVHCILRREVQDAVKCRVVDRQEEGNGDSGGSFQNGHAQLMTDFEKDVDLACRSVLNKDIAACRTATITGTLKRPSLPEEEKLKLAHAKGPPTNFNSLPANVSKLHLHGSPRYPGGPLPDFPNHSLTLKRDKAPKSSFVGDGDIFKKLDSELSRAQEKALDTSYVILPTATATLRPKPKEEPKYSIHIDQMPQTRLIHLSTAPEASLPARSPPSRQPPSGGPPEAPPAQPPPPPPPPPPPPQQPLPPPPNLEPAPPSLGDPGEPAAHPGPSTGPSTKNENVATLSVSSLERRKSRYAELDFEKIMHTRKRHQDMFQDLNRKLQHAAEKDKEVLGPDSKPEKQQTPNKRPWESLRKAHGTPTWVKKELEPLQPSPLELRSVEWERSGATIPLVGQDIIDLQTEV

SEQ ID NO: 34 - protein, 918 aa, Homo sapiens
AAGADAGPGPEPCATLVQGKFFGYFSAAAVFPANASRCSWTLRNPDPRRYTLYMKVAKAPVPCSGPGRVRTYQFDSFLESTRTYLGVESFDEVLRLCDPSAPLAFLQASKQFLQMRRQQPPQHDGLRPRAGPPGPTDDFSVEYLVVGNRNPSRAACQMLCRWLDACLAGSRSSHPCGIMQTPCACLGGEAGGPAAGPLAPRGDVCLRDAVAGGPENCLTSLTQDRGGHGATGGWKLWSLWGECTRDCGGGLQTRTRTCLPAPGVEGGGCEGVLEEGRQCNREACGPAGRTSSRSQSLRSTDARRREELGDELQQFGFPAPQTGDPAAEEWSPWSVCSSTCGEGWQTRTRFCVSSSYSTQCSGPLREQRLCNNSAVCPVHGAWDEWSPWSLCSSTCGRGFRDRTRTCRPPQFGGNPCEGPEKQTKFCNIALCPGRAVDGNWNEWSSWSACSASCSQGRQQRTRECNGPSYGGAECQGHWVETRDCFLQQCPVDGKWQAWASWGSCSVTCGAGSQRRERVCSGPFFGGAACQGPQDEYRQCGTQRCPEPHEICDEDNFGAVIWKETPAGEVAAVRCPRNATGLILRRCELDEEGIAYWEPPTYIRCVSIDYRNIQMMTREHLAKAQRGLPGEGVSEVIQTLVEISQDGTSYSGDLLSTIDVLRNMTEIFRRAYYSPTPGDVQNFVQILSNLLAEENRDKWEEAQLAGPNAKELFRLVEDFVDVIGFRMKDLRDAYQVTDNLVLSIHKLPASGATDISFPMKGWRATGDWAKVPEDRVTVSKSVFSTGLTEADEASVFVVGTVLYRNLGSFLALQRNTTVLNSKVISVTVKPPPRSLRTPLEIEFAHMYNGTTNQTCILWDETDVPSSSAPPQLGPWSWRGCRTVPLDALRTRCLCDRLSTFAILAQLSADANMEKATLPS

SEQ ID NO: 35 - protein, 345 aa, Homo sapiens
MISPVLILFSSFLCHVAIAGRTCPKPDDLPFSTVVPLKTFYEPGEEITYSCKPGYVSRGGMRKFICPLTGLWPINTLKCTPRVCPFAGILENGAVRYTTFEYPNTISFSCNTGFYLNGADSAKCTEEGKWSPELPVCAPIICPPPSIPTFATLRVYKPSAGNNSLYRDTAVFECLPQHAMFGNDTITCTTHGNWTKLPECREVKCPFPSRPDNGFVNYPAKPTLYYKDKATFGCHDGYSLDGPEEIECTKLGNWSAMPSCKASCKVPVKKATVVYQGERVKIQEKFKNGMLHGDKVSFFCKNKEKKCSYTEDAQCIDGTIEVPKCFKEHSSLAFWKTDASDVKPC

SEQ ID NO: 36 - protein, 622 aa, Homo sapiens
MAHVRGLQLPGCLALAALCSLVHSQHVFLAPQQARSLLQRVRRANTFLEEVRKGNLERECVEETCSYEEAFEALESSTATDVFWAKYTACETARTPRDKLAACLEGNCAEGLGTNYRGHVNITRSGIECQLWRSRYPHKPEINSTTHPGADLQENFCRNPDSSTTGPWCYTTDPTVRRQECSIPVCGQDQVTVAMTPRSEGSSVNLSPPLEQCVPDRGQQYQGRLAVTTHGLPCLAWASAQAKALSKHQDFNSAVQLVENFCRNPDGDEEGVWCYVAGKPGDFGYCDLNYCEEAVEEETGDGLDEDSDRAIEGRTATSEYQTFFNPRTFGSGEADCGLRPLFEKKSLEDKTERELLESYIDGRIVEGSDAEIGMSPWQVMLFRKSPQELLCGASLISDRWVLTAAHCLLYPPWDKNFTENDLLVRIGKHSRTRYERNIEKISMLEKIYIHPRYNWRENLDRDIALMKLKKPVAFSDYIHPVCLPDRETAASLLQAGYKGRVTGWGNLKETWTANVGKGQPSVLQVVNLPIVERPVCKDSTRIRITDNMFCAGYKPDEGKRGDACEGDSGGPFVMKSPFNNRWYQMGIVSWGEGCDRDGKYGFYTHVFRLKKWIQKVIDQFGE

SEQ ID NO: 37 - protein, 466 aa, Homo sapiens
MVSQALRLLCLLLGLQGCLAAGGVAKASGGETRDMPWKPGPHRVFVTQEEAHGVLHRRRRANAFLEELRPGSLERECKEEQCSFEEAREIFKDAERTKLFWISYSDGDQCASSPCQNGGSCKDQLQSYICFCLPAFEGRNCETHKDDQLICVNENGGCEQYCSDHTGTKRSCRCHEGYSLLADGVSCTPTVEYPCGKIPILEKRNASKPQGRIVGGKVCPKGECPWQVLLLVNGAQLCGGTLINTIWVVSAAHCFDKIKNWRNLIAVLGEHDLSEHDGDEQSRRVAQVIIPSTYVPGTTNHDIALLRLHQPVVLTDHVVPLCLPERTFSERTLAFVRFSLVSGWGQLLDRGATALELMVLNVPRLMTQDCLQQSRKVGDSPNITEYMFCAGYSDGSKDSCKGDSGGPHATHYRGTWYLTGIVSWGQGCATVGHFGVYTRVSQYIEWLQKLMRSEPRPGVLLRAPFP

SEQ ID NO: 38 - protein, 461 aa, Homo sapiens
MQRVNMIMAESPGLITICLLGYLLSAECTVFLDHENANKILNRPKRYNSGKLEEFVQGNLERECMEEKCSFEEAREVFENTERTTEFWKQYVDGDQCESNPCLNGGSCKDDINSYECWCPFGFEGKNCELDVTCNIKNGRCEQFCKNSADNKVVCSCTEGYRLAENQKSCEPAVPFPCGRVSVSQTSKLTRAETVFPDVDYVNSTEAETILDNITQSTQSFNDFTRVVGGEDAKPGQFPWQVVLNGKVDAFCGGSIVNEKWIVTAAHCVETGVKITVVAGEHNIEETEHTEQKRNVIRIIPHHNYNAAINKYNHDIALLELDEPLVLNSYVTPICIADKEYTNIFLKFGSGYVSGWGRVFHKGRSALVLQYLRVPLVDRATCLRSTKFTIYNNMFCAGFHEGGRDSCQGDSGGPHVTEVEGTSFLTGIISWGEECAMKGKYGIYTKVSRYVNWIKEKTKLT

SEQ ID NO: 39 - protein, 488 aa, Homo sapiens
MGRPLHLVLLSASLAGLLLLGESLFIRREQANNILARVTRANSFLEEMKKGHLERECMEETCSYEEAREVFEDSDKTNEFWNKYKDGDQCETSPCQNQGKCKDGLGEYTCTCLEGFEGKNCELFTRKLCSLDNGDCDQFCHEEQNSVVCSCARGYTLADNGKACIPTGPYPCGKQTLERRKRSVAQATSSSGEAPDSITWKPYDAADLDPTENPFDLLDFNQTQPERGDNNLTRIVGGQECKDGECPWQALLINEENEGFCGGTILSEFYILTAAHCLYQAKRFKVRVGDRNTEQEEGGEAVHEVEVVIKHNRFTKETYDFDIAVLRLKTPITFRMNVAPACLPERDWAESTLMTQKTGIVSGFGRTHEKGRQSTRLKMLEVPYVDRNSCKLSSSFIITQNMFCAGYDTKQEDACQGDSGGPHVTRFKDTYFVTGIVSWGEGCARKGKYGIYTKVTAFLKWIDRSMKTRGLPKAKSHAPEVITSSPLK

SEQ ID NO: 40 - protein, 678 aa, Homo sapiens
MAPSLSPGPAALRRAPQLLLLLLAAECALAALLPAREATQFLRPRQRRAFQVFEEAKQGHLERECVEELCSREEAREVFENDPETDYFYPRYLDCINKYGSPYTKNSGFATCVQNLPDQCTPNPCDRKGTQACQDLMGNFFCLCKAGWGGRLCDKDVNECSQENGGCLQICHNKPGSFHCSCHSGFELSSDGRTCQDIDECADSEACGEARCKNLPGSYSCLCDEGFAYSSQEKACRDVDECLQGRCEQVCVNSPGSYTCHCDGRGGLKLSQDMDTCEDILPCVPFSVAKSVKSLYLGRMFSGTPVIRLRFKRLQPTRLVAEFDFRTFDPEGILLFAGGHQDSTWIVLALRAGRLELQLRYNGVGRVTSSGPVINHGMWQTISVEELARNLVIKVNRDAVMKIAVAGDLFQPERGLYHLNLTVGGIPFHEKDLVQPINPRLDGCMRSWNWLNGEDTTIQETVKVNTRMQCFSVTERGSFYPGSGFAFYSLDYMRTPLDVGTESTWEVEVVAHIRPAADTGVLFALWAPDLRAVPLSVALVDYHSTKKLKKQLVVLAVEHTALALMEIKVCDGQEHVVTVSLRDGEATLEVDGTRGQSEVSAAQLQERLAVLERHLRSPVLTFAGGLPDVPVTSAPVTAFYRGCMTLEVNRRLLDLDEAAYKHSDITAHSCPPVEPAAA

SEQ ID NO: 41 - protein, 387 aa, Homo sapiens
MPRPRLLAALCGALLCAPSLLVALDICSKNPCHNGGLCEEISQEVRGDVFPSYTCTCLKGYAGNHCETKCVEPLGLENGNIANSQIAASSVRVTFLGLQHWVPELARLNRAGMVNAWTPSSNDDNPWIQVNLLRRMWVTGVVTQGASRLASHEYLKAFKVAYSLNGHEFDFIHDVNKKHKEFVGNWNKNAVHVNLFETPVEAQYVRLYPTSCHTACTLRFELLGCELNGCANPLGLKNNSIPDKQITASSSYKTWGLHLFSWNPSYARLDKQGNFNAWVAGSYGNDQWLQVDLGSSKEVTGIITQGARNFGSVQFVASYKVAYSNDSANWTEYQDPRTGSSKIFPGNWDNHSHKKNLFETPILARYVRILPVAWHNRIALRLELLGC

SEQ ID NO: 42 - protein, 404 aa, Homo sapiens
MAAGTAVGAWVLVLSLWGAVVGAQNITARIGEPLVLKCKGAPKKPPQRLEWKLNTGRTEAWKVLSPQGGGPWDSVARVLPNGSLFLPAVGIQDEGIFRCQAMNRNGKETKSNYRVRVYQIPGKPEIVDSASELTAGVPNKVGTCVSEGSYPAGTLSWHLDGKPLVPNEKGVSVKEQTRRHPETGLFTLQSELMVTPARGGDPRPTFSCSFSPGLPRHRALRTAPIQPRVWEPVPLEEVQLVVEPEGGAVAPGGTVTLTCEVPAQPSPQIHWMKDGVPLPLPPSPVLILPEIGPQDQGTYSCVATHSSHGPQESRAVSISIIEPGEEGPTAGSVGGSGLGTLALALGILGGLGTAALLIGVILWQRRQRRGEERKAPENQEEEEERAELNQSEEPEAGESSTGGP

SEQ ID NO: 43 - protein, 320 aa, Homo sapiens
AQNITARIGEPLVLKCKGAPKKPPQRLEWKLNTGRTEAWKVLSPQGGGPWDSVARVLPNGSLFLPAVGIQDEGIFRCQAMNRNGKETKSNYRVRVYQIPGKPEIVDSASELTAGVPNKVGTCVSEGSYPAGTLSWHLDGKPLVPNEKGVSVKEQTRRHPETGLFTLQSELMVTPARGGDPRPTFSCSFSPGLPRHRALRTAPIQPRVWEPVPLEEVQLVVEPEGGAVAPGGTVTLTCEVPAQPSPQIHWMKDGVPLPLPPSPVLILPEIGPQDQGTYSCVATHSSHGPQESRAVSISIIEPGEEGPTAGSVGGSGLGTLA

SEQ ID NO: 44 - protein, 556 aa, Homo sapiens
CSPLPCNEDGYMSCKDGKASFTCTCKPGWQGEKCEFDINECKDPSNINGGCSQICDNTPGSYHCSCKNGFVMLSNKKDCKDVDECSLKPSICGTAVCKNIPGDFECECPEGYRYNLKSKSCEDIDECSENMCAQLCVNYPGGYTCYCDGKKGFKLAQDQKSCEVVSVCLPLNLDTKYELLYLAEQFAGVVLYLKFRLPEISRFSAEFDFRTYDSEGVILYAESIDHSAWLLIALRGGKIEVQLKNEHTSKITTGGDVINNGLWNMVSVEELEHSISIKIAKEAVMDINKPGPLFKPENGLLETKVYFAGFPRKVESELIKPINPRLDGCIRSWNLMKQGASGIKEIIQEKQNKHCLVTVEKGSYYPGSGIAQFHIDYNNVSSAEGWHVNVTLNIRPSTGTGVMLALVSGNNTVPFAVSLVDSTSEKSQDILLSVENTVIYRIQALSLCSDQQSHLEFRVNRNNLELSTPLKIETISHEDLQRQLAVLDKAMKAKVATYLGGLPDVPFSATPVNAFYNGCMEVNINGVQLDLDEAISKHNDIRAHSCPSVWKKTKNS

SEQ ID NO: 45 - protein, 2570 aa, Homo sapiens
MAGPRGLLPLCLLAFCLAGFSFVRGQVLFKGCDVKTTFVTHVPCTSCAAIKKQTCPSGWLRELPDQITQDCRYEVQLGGSMVSMSGCRRKCRKQVVQKACCPGYWGSRCHECPGGAETPCNGHGTCLDGMDRNGTCVCQENFRGSACQECQDPNRFGPDCQSVCSCVHGVCNHGPRGDGSCLCFAGYTGPHCDQELPVCQELRCPQNTQCSAEAPSCRCLPGYTQQGSECRAPNPCWPSPCSLLAQCSVSPKGQAQCHCPENYHGDGMVCLPKDPCTDNLGGCPSNSTLCVYQKPGQAFCTCRPGLVSINSNASAGCFAFCSPFSCDRSATCQVTADGKTSCVCRESEVGDGRACYGHLLHEVQKATQTGRVFLQLRVAVAMMDQGCREILTTAGPFTVLVPSVSSFSSRTMNASLAQQLCRQHIIAGQHILEDTRTQQTRRWWTLAGQEITVTFNQFTKYSYKYKDQPQQTFNIYKANNIAANGVFHVVTGLRWQAPSGTPGDPKRTIGQILASTEAFSRFETILENCGLPSILDGPGPFTVFAPSNEAVDSLRDGRLIYLFTAGLSKLQELVRYHIYNHGQLTVEKLISKGRILTMANQVLAVNISEEGRILLGPEGVPLQRVDVMAANGVIHMLDGILLPPTILPILPKHCSEEQHKIVAGSCVDCQALNTSTCPPNSVKLDIFPKECVYIHDPTGLNVLKKGCASYCNQTIMEQGCCKGFFGPDCTQCPGGFSNPCYGKGNCSDGIQGNGACLCFPDYKGIACHICSNPNKHGEQCQEDCGCVHGLCDNRPGSGGVCQQGTCAPGFSGRFCNESMGDCGPTGLAQHCHLHARCVSQEGVARCRCLDGFEGDGFSCTPSNPCSHPDRGGCSENAECVPGSLGTHHCTCHKGWSGDGRVCVAIDECELDMRGGCHTDALCSYVGPGQSRCTCKLGFAGDGYQCSPIDPCRAGNGGCHGLATCRAVGGGQRVCTCPPGFGGDGFSCYGDIFRELEANAHFSIFYQWLKSAGITLPADRRVTALVPSEAAVRQLSPEDRAFWLQPRTLPNLVRAHFLQGALFEEELARLGGQEVATLNPTTRWEIRNISGRVWVQNASVDVADLLATNGVLHILSQVLLPPRGDVPGGQGLLQQLDLVPAFSLFRELLQHHGLVPQIEAATAYTIFVPTNRSLEAQGNSSHLDADTVRHHVVLGEALSMETLRKGGHRNSLLGPAHWIVFYNHSGQPEVNHVPLEGPMLEAPGRSLIGLSGVLTVGSSRCLHSHAEALREKCVNCTRRFRCTQGFQLQDTPRKSCVYRSGFSFSRGCSYTCAKKIQVPDCCPGFFGTLCEPCPGGLGGVCSGHGQCQDRFLGSGECHCHEGFHGTACEVCELGRYGPNCTGVCDCAHGLCQEGLQGDGSCVCNVGWQGLRCDQKITSPQCPRKCDPNANCVQDSAGASTCACAAGYSGNGIFCSEVDPCAHGHGGCSPHANCTKVAPGQRTCTCQDGYMGDGELCQEINSCLIHHGGCHIHAECIPTGPQQVSCSCREGYSGDGIRTCELLDPCSKNNGGCSPYATCKSTGDGQRTCTCDTAHTVGDGLTCRARVGLELLRDKHASFFSLRLLEYKELKGDGPFTIFVPHADLMSNLSQDELARIRAHRQLVFRYHVVGCRRLRSEDLLEQGYATALSGHPLRFSEREGSIYLNDFARVVSSDHEAVNGILHFIDRVLLPPEALHWEPDDAPIPRRNVTAAAQGFGYKIFSGLLKVAGLLPLLREASHRPFTMLWPTDAAFRALPPDRQAWLYHEDHRDKLAAILRGHMIRNVEALASDLPNLGPLRTMHGTPISFSCSRTRAGELMVGEDDARIVQRHLPFEGGLAYGIDQLLEPPGLGARCDHFETRPLRLNTCSICGLEPPCPEGSQEQGSPEACWRFYPKFWTSPPLHSLGLRSVWVHPSLWGRPQGLGRGCHRNCVTTTWKPSCCPGHYGSECQACPGGPSSPCSDRGVCMDGMSGSGQCLCRSGFAGTACELCAPGAFGPHCQACRCTVHGRCDEGLGGSGSCFCDEGWTGPRCEVQLELQPVCTPPCAPEAVCRAGNSCECSLGYEGDGRVCTVADLCQDGHGGCSEHANCSQVGTMVTCTCLPDYEGDGWSCRARNPCTDGHRGGCSEHANCLSTGLNTRRCECHAGYVGDGLQCLEESEPPVDRCLGQPPPCHSDAMCTDLHFQEKRAGVFHLQATSGPYGLNFSEAEAACEAQGAVLASFPQLSAAQQLGFHLCLMGWLANGSTAHPVVFPVADCGNGRVGIVSLGARKNLSERWDAYCFRVQDVACRCRNGFVGDGISTCNGKLLDVLAATANFSTFYGMLLGYANATQRGLDFLDFLDDELTYKTLFVPVNEGFVDNMTLSGPDLELHASNATLLSANASQGKLLPAHSGLSLIISDAGPDNSSWAPVAPGTVVVSRIIVWDIMAFNGIIHALASPLLAPPQPQAVLAPEAPPVAAGVGAVLAAGALLGLVAGALYLRARGKPMGFGFSAFQAEDDADDDFSPWQEGTNPTLVSVPNPVFGSDTFCEPFDDSLLEEDFPDTQRILTVK

SEQ ID NO: 46 - protein, 2453 aa, Homo sapiens
QVLFKGCDVKTTFVTHVPCTSCAAIKKQTCPSGWLRELPDQITQDCRYEVQLGGSMVSMSGCRRKCRKQVVQKACCPGYWGSRCHECPGGAETPCNGHGTCLDGMDRNGTCVCQENFRGSACQECQDPNRFGPDCQSVCSCVHGVCNHGPRGDGSCLCFAGYTGPHCDQELPVCQELRCPQNTQCSAEAPSCRCLPGYTQQGSECRAPNPCWPSPCSLLAQCSVSPKGQAQCHCPENYHGDGMVCLPKDPCTDNLGGCPSNSTLCVYQKPGQAFCTCRPGLVSINSNASAGCFAFCSPFSCDRSATCQVTADGKTSCVCRESEVGDGRACYGHLLHEVQKATQTGRVFLQLRVAVAMMDQGCREILTTAGPFTVLVPSVSSFSSRTMNASLAQQLCRQHIIAGQHILEDTRTQQTRRWWTLAGQEITVTFNQFTKYSYKYKDQPQQTFNIYKANNIAANGVFHVVTGLRWQAPSGTPGDPKRTIGQILASTEAFSRFETILENCGLPSILDGPGPFTVFAPSNEAVDSLRDGRLIYLFTAGLSKLQELVRYHIYNHGQLTVEKLISKGRILTMANQVLAVNISEEGRILLGPEGVPLQRVDVMAANGVIHMLDGILLPPTILPILPKHCSEEQHKIVAGSCVDCQALNTSTCPPNSVKLDIFPKECVYIHDPTGLNVLKKGCASYCNQTIMEQGCCKGFFGPDCTQCPGGFSNPCYGKGNCSDGIQGNGACLCFPDYKGIACHICSNPNKHGEQCQEDCGCVHGLCDNRPGSGGVCQQGTCAPGFSGRFCNESMGDCGPTGLAQHCHLHARCVSQEGVARCRCLDGFEGDGFSCTPSNPCSHPDRGGCSENAECVPGSLGTHHCTCHKGWSGDGRVCVAIDECELDMRGGCHTDALCSYVGPGQSRCTCKLGFAGDGYQCSPIDPCRAGNGGCHGLATCRAVGGGQRVCTCPPGFGGDGFSCYGDIFRELEANAHFSIFYQWLKSAGITLPADRRVTALVPSEAAVRQLSPEDRAFWLQPRTLPNLVRAHFLQGALFEEELARLGGQEVATLNPTTRWEIRNISGRVWVQNASVDVADLLATNGVLHILSQVLLPPRGDVPGGQGLLQQLDLVPAFSLFRELLQHHGLVPQIEAATAYTIFVPTNRSLEAQGNSSHLDADTVRHHVVLGEALSMETLRKGGHRNSLLGPAHWIVFYNHSGQPEVNHVPLEGPMLEAPGRSLIGLSGVLTVGSSRCLHSHAEALREKCVNCTRRFRCTQGFQLQDTPRKSCVYRSGFSFSRGCSYTCAKKIQVPDCCPGFFGTLCEPCPGGLGGVCSGHGQCQDRFLGSGECHCHEGFHGTACEVCELGRYGPNCTGVCDCAHGLCQEGLQGDGSCVCNVGWQGLRCDQKITSPQCPRKCDPNANCVQDSAGASTCACAAGYSGNGIFCSEVDPCAHGHGGCSPHANCTKVAPGQRTCTCQDGYMGDGELCQEINSCLIHHGGCHIHAECIPTGPQQVSCSCREGYSGDGIRTCELLDPCSKNNGGCSPYATCKSTGDGQRTCTCDTAHTVGDGLTCRARVGLELLRDKHASFFSLRLLEYKELKGDGPFTIFVPHADLMSNLSQDELARIRAHRQLVFRYHVVGCRRLRSEDLLEQGYATALSGHPLRFSEREGSIYLNDFARVVSSDHEAVNGILHFIDRVLLPPEALHWEPDDAPIPRRNVTAAAQGFGYKIFSGLLKVAGLLPLLREASHRPFTMLWPTDAAFRALPPDRQAWLYHEDHRDKLAAILRGHMIRNVEALASDLPNLGPLRTMHGTPISFSCSRTRAGELMVGEDDARIVQRHLPFEGGLAYGIDQLLEPPGLGARCDHFETRPLRLNTCSICGLEPPCPEGSQEQGSPEACWRFYPKFWTSPPLHSLGLRSVWVHPSLWGRPQGLGRGCHRNCVTTTWKPSCCPGHYGSECQACPGGPSSPCSDRGVCMDGMSGSGQCLCRSGFAGTACELCAPGAFGPHCQACRCTVHGRCDEGLGGSGSCFCDEGWTGPRCEVQLELQPVCTPPCAPEAVCRAGNSCECSLGYEGDGRVCTVADLCQDGHGGCSEHANCSQVGTMVTCTCLPDYEGDGWSCRARNPCTDGHRGGCSEHANCLSTGLNTRRCECHAGYVGDGLQCLEESEPPVDRCLGQPPPCHSDAMCTDLHFQEKRAGVFHLQATSGPYGLNFSEAEAACEAQGAVLASFPQLSAAQQLGFHLCLMGWLANGSTAHPVVFPVADCGNGRVGIVSLGARKNLSERWDAYCFRVQDVACRCRNGFVGDGISTCNGKLLDVLAATANFSTFYGMLLGYANATQRGLDFLDFLDDELTYKTLFVPVNEGFVDNMTLSGPDLELHASNATLLSANASQGKLLPAHSGLSLIISDAGPDNSSWAPVAPGTVVVSRIIVWDIMAFNGIIHALASPLLAPPQPQAVLAPEAPPVAA

SEQ ID NO: 47 - protein, 2551 aa, Homo sapiens
MMLQHLVIFCLGLVVQNFCSPAETTGQARRCDRKSLLTIRTECRSCALNLGVKCPDGYTMITSGSVGVRDCRYTFEVRTYSLSLPGCRHICRKDYLQPRCCPGRWGPDCIECPGGAGSPCNGRGSCAEGMEGNGTCSCQEGFGGTACETCADDNLFGPSCSSVCNCVHGVCNSGLDGDGTCECYSAYTGPKCDKPIPECAALLCPENSRCSPSTEDENKLECKCLPNYRGDGKYCDPINPCLRKICHPHAHCTYLGPNRHSCTCQEGYRGDGQVCLPVDPCQINFGNCPTKSTVCKYDGPGQSHCECKEHYQNFVPGVGCSMTDICKSDNPCHRNANCTTVAPGRTECICQKGYVGDGLTCYGNIMERLRELNTEPRGKWQGRLTSFISLLDKAYAWPLSKLGPFTVLLPTDKGLKGFNVNELLVDNKAAQYFVKLHIIAGQMNIEYMNNTDMFYTLTGKSGEIFNSDKDNQIKLKLHGGKKKVKIIQGDIIASNGLLHILDRAMDKLEPTFESNNEQTIMTMLQPRYSKFRSLLEETNLGHALDEDGVGGPYTIFVPNNEALNNMKDGTLDYLLSPEGSRKLLELVRYHIVPFTQLEVATLISTPHIRSMANQLIQFNTTDNGQILANDVAMEEIEITAKNGRIYTLTGVLIPPSIVPILPHRCDETKREMKLGTCVSCSLVYWSRCPANSEPTALFTHRCVYSGRFGSLKSGCARYCNATVKIPKCCKGFYGPDCNQCPGGFSNPCSGNGQCADSLGGNGTCICEEGFQGSQCQFCSDPNKYGPRCNKKCLCVHGTCNNRIDSDGACLTGTCRDGSAGRLCDKQTSACGPYVQFCHIHATCEYSNGTASCICKAGYEGDGTLCSEMDPCTGLTPGGCSRNAECIKTGTGTHTCVCQQGWTGNGRDCSEINNCLLPSAGGCHDNASCLYVGPGQNECECKKGFRGNGIDCEPITSCLEQTGKCHPLASCQSTSSGVWSCVCQEGYEGDGFLCYGNAAVELSFLSEAAIFNRWINNASLQPTLSATSNLTVLVPSQQATEDMDQDEKSFWLSQSNIPALIKYHMLLGTYRVADLQTLSSSDMLATSLQGNFLHLAKVDGNITIEGASIVDGDNAATNGVIHIINKVLVPQRRLTGSLPNLLMRLEQMPDYSIFRGYIIQYNLANAIEAADAYTVFAPNNNAIENYIREKKVLSLEEDVLRYHVVLEEKLLKNDLHNGMHRETMLGFSYFLSFFLHNDQLYVNEAPINYTNVATDKGVIHGLGKVLEIQKNRCDNNDTTIIRGRCRTCSSELTCPFGTKSLGNEKRRCIYTSYFMGRRTLFIGCQPKCVRTVITRECCAGFFGPQCQPCPGNAQNVCFGNGICLDGVNGTGVCECGEGFSGTACETCTEGKYGIHCDQACSCVHGRCNQGPLGDGSCDCDVGWRGVHCDNATTEDNCNGTCHTSANCLTNSDGTASCKCAAGFQGNGTICTAINACEISNGGCSAKADCKRTTPGRRVCTCKAGYTGDGIVCLEINPCLENHGGCDKNAECTQTGPNQAACNCLPAYTGDGKVCTLINVCLTKNGGCSEFAICNHTGQVERTCTCKPNYIGDGFTCRGSIYQELPKNPKTSQYFFQLQEHFVKDLVGPGPFTVFAPLSAAFDEEARVKDWDKYGLMPQVLRYHVVACHQLLLENLKLISNATSLQGEPIVISVSQSTVYINNKAKIISSDIISTNGIVHIIDKLLSPKNLLITPKDNSGRILQNLTTLATNNGYIKFSNLIQDSGLLSVITDPIHTPVTLFWPTDQALHALPAEQQDFLFNQDNKDKLKEYLKFHVIRDAKVLAVDLPTSTAWKTLQGSELSVKCGAGRDIGDLFLNGQTCRIVQRELLFDLGVAYGIDCLLIDPTLGGRCDTFTTFDASGECGSCVNTPSCPRWSKPKGVKQKCLYNLPFKRNLEGCRERCSLVIQIPRCCKGYFGRDCQACPGGPDAPCNNRGVCLDQYSATGECKCNTGFNGTACEMCWPGRFGPDCLPCGCSDHGQCDDGITGSGQCLCETGWTGPSCDTQAVLPAVCTPPCSAHATCKENNTCECNLDYEGDGITCTVVDFCKQDNGGCAKVARCSQKGTKVSCSCQKGYKGDGHSCTEIDPCADGLNGGCHEHATCKMTGPGKHKCECKSHYVGDGLNCEPEQLPIDRCLQDNGQCHADAKCVDLHFQDTTVGVFHLRSPLGQYKLTFDKAREACANEAATMATYNQLSYAQKAKYHLCSAGWLETGRVAYPTAFASQNCGSGVVGIVDYGPRPNKSEMWDVFCYRMKDVNCTCKVGYVGDGFSCSGNLLQVLMSFPSLTNFLTEVLAYSNSSARGRAFLEHLTDLSIRGTLFVPQNSGLGENETLSGRDIEHHLANVSMFFYNDLVNGTTLQTRLGSKLLITASQDPLQPTETRFVDGRAILQWDIFASNGIIHVISRPLKAPPAPVTLTHTGLGAGIFFAIILVTGAVALAAYSYFRINRRTIGFQHFESEEDINVAALGKQQPENISNPLYESTTSAPPEPSYDPFTDSEERQLEGNDPLRTL

SEQ ID NO: 48 - protein, 2453 aa, Homo sapiens; identical to SEQ ID NO: 46

SEQ ID NO: 49 - protein, 364 aa, Homo sapiens
MHPQVVILSLILHLADSVAGSVKVGGEAGPSVTLPCHYSGAVTSMCWNRGSCSLFTCQNGIVWTNGTHVTYRKDTRYKLLGDLSRRDVSLTIENTAVSDSGVYCCRVEHRGWFNDMKITVSLEIVPPKVTTTPIVTTVPTVTTVRTSTTVPTTTTVPMTTVPTTTVPTTMSIPTTTTVLTTMTVSTTTSVPTTTSIPTTTSVPVTTTVSTFVPPMPLPRQNHEPVATSPSSPQPAETHPTTLQGAIRREPTSSPLYSYTTDGNDTVTESSDGLWNNNQTQLFLEHSLLTANTTKGIYAGVCISVLVLLALLGVIIAKKYFFKKEVQQLSVSFSSLQIKALQNAVEKEVQAEDNIYIENSLYATD

SEQ ID NO: 50 - protein, 275 aa, Homo sapiens
SVKVGGEAGPSVTLPCHYSGAVTSMCWNRGSCSLFTCQNGIVWTNGTHVTYRKDTRYKLLGDLSRRDVSLTIENTAVSDSGVYCCRVEHRGWFNDMKITVSLEIVPPKVTTTPIVTTVPTVTTVRTSTTVPTTTTVPMTTVPTTTVPTTMSIPTTTTVLTTMTVSTTTSVPTTTSIPTTTSVPVTTTVSTFVPPMPLPRQNHEPVATSPSSPQPAETHPTTLQGAIRREPTSSPLYSYTTDGNDTVTESSDGLWNNNQTQLFLEHSLLTANTTKG

SEQ ID NO: 51 - protein, 301 aa, Homo sapiens
MFSHLPFDCVLLLLLLLLTRSSEVEYRAEVGQNAYLPCFYTPAAPGNLVPVCWGKGACPVFECGNVVLRTDERDVNYWTSRYWLNGDFRKGDVSLTIENVTLADSGIYCCRIQIPGIMNDEKFNLKLVIKPAKVTPAPTRQRDFTAAFPRMLTTRGHGPAETQTLGSLPDINLTQISTLANELRDSRLANDLRDSGATIRIGIYIGAGICAGLALALIFGALIFKWYSHSKEKIQNLSLISLANLPPSGLANAVAEGIRSEENIYTIEENVYEVEEPNEYYCYVSSRQQPSQPLGCRFAMP

SEQ ID NO: 52 - protein, 181 aa, Homo sapiens
SEVEYRAEVGQNAYLPCFYTPAAPGNLVPVCWGKGACPVFECGNVVLRTDERDVNYWTSRYWLNGDFRKGDVSLTIENVTLADSGIYCCRIQIPGIMNDEKFNLKLVIKPAKVTPAPTRQRDFTAAFPRMLTTRGHGPAETQTLGSLPDINLTQISTLANELRDSRLANDLRDSGATIRIG

SEQ ID NO: 53 - protein, 318 aa, Homo sapiens
YSGCKEALIRTDGMRVTSRKSAKYRLQGTIPRGDVSLTILNPSESDSGVYCCRIEVPGWFNDVKINVRLNLQRASTTTHRTATTTTRRTTTTSPTTTRQMTTTPAALPTTVVTTPDLTTGTPLQMTTIAVFTTANTCLSLTPSTLPEEATGLLTPEPSKEGPILTAESETVLPSDSWSSVESTSADTVLLTSKESKVWDLPSTSHVSMWKTSDSVSSPQPGASDTAVPEQNKTTKTGQMDGIPMSMKNEMPISQLLMIIAPSLGFVLFALFVAFLLRGKLMETYCSQKHTRLDYIGDSKNVLNDVQHGREDEDGLFTL

SEQ ID NO: 54 - protein, 290 aa, Homo sapiens [sequence omitted]

SEQ ID NO: 55 - protein, 672 aa, Homo sapiens
MADVFPGNDSTASQDVANRFARKGALRQKNVHEVKDHKFIARFFKQPTFCSHCTDFIWGFGKQGFQCQVCCFVVHKRCHEFVTFSCPGADKGPDTDDPRSKHKFKIHTYGSPTFCDHCGSLLYGLIHQGMKCDTCDMNVHKQCVINVPSLCGMDHTEKRGRIYLKAEVADEKLHVTVRDAKNLIPMDPNGLSDPYVKLKLIPDPKNESKQKTKTIRSTLNPQWNESFTFKLKPSDKDRRLSVEIWDWDRTTRNDFMGSLSFGVSELMKMPASGWYKLLNQEEGEYYNVPIPEGDEEGNMELRQKFEKAKLGPAGNKVISPSEDRKQPSNNLDRVKLTDFNFLMVLGKGSFGKVMLADRKGTEELYAIKILKKDVVIQDDDVECTMVEKRVLALLDKPPFLTQLHSCFQTVDRLYFVMEYVNGGDLMYHIQQVGKFKEPQAVFYAAEISIGLFFLHKRGIIYRDLKLDNVMLDSEGHIKIADFGMCKEHMMDGVTTRTFCGTPDYIAPEIIAYQPYGKSVDWWAYGVLLYEMLAGQPPFDGEDEDELFQSIMEHNVSYPKSLSKEAVSVCKGLMTKHPAKRLGCGPEGERDVREHAFFRRIDWEKLENREIQPPFKPKVCGKGAENFDKFFTRGQPVLTPPDQLVIANIDQSDFEGFSYVNPQFVHPILQSAV

SEQ ID NO: 56 - protein, 118 aa, Homo sapiens
KRGRIYLKAEVADEKLHVTVRDAKNLIPMDPNGLSDPYVKLKLIPDPKNESKQKTKTIRSTLNPQWNESFTFKLKPSDKDRRLSVEIWDWDRTTRNDFMGSLSFGVSELMKMPASGWY

SEQ ID NO: 57 - protein, 362 aa, Homo sapiens
LIAIAIVAVLLVLTCCFCICKKCLFKKKNKKKGKEKGGKNAINMKDVKDLGKTMKDQALKDDDAETGLTDGEEKEEPKEEEKLGKLQYSLDYDFQNNQLLVGIIQAAELPALDMGGTSDPYVKVFLLPDKKKKFETKVHRKTLNPVFNEQFTFKVPYSELGGKTLVMAVYDFDRFSKHDIIGEFKVPMNTVDFGHVTEEWRDLQSAEKEEQEKLGDICFSLRYVPTAGKLTVVILEAKNLKKMDVGGLSDPYVKIHLMQNGKRLKKKKTTIKKNTLNPYYNESFSFEVPFEQIQKVQVVVTVLDYDKIGKNDAIGKVFVGYNSTGAELRHWSDMLANPRRPIAQWHTLQVEEEVDAMLAVKK

SEQ ID NO: 58 - protein, 120 aa, Homo sapiens
KLGKLQYSLDYDFQNNQLLVGIIQAAELPALDMGGTSDPYVKVFLLPDKKKKFETKVHRKTLNPVFNEQFTFKVPYSELGGKTLVMAVYDFDRFSKHDIIGEFKVPMNTVDFGHVTEEWR

SEQ ID NO: 59 - protein, 403 aa, Homo sapiens
MNHKSKKRIREAKRSARPELKDSLDWTRHNYYESFSLSPAAVADNVERADALQLSVEEFVERYERPYKPVVLLNAQEGWSAQEKWTLERLKRKYRNQKFKCGEDNDGYSVKMKMKYYIEYMESTRDDSPLYIFDSSYGEHPKRRKLLEDYKVPKFFTDDLFQYAGEKRRPPYRWFVMGPPRSGTGIHIDPLGTSAWNALVQGHKRWCLFPTSTPRELIKVTRDEGGNQQDEAITWFNVIYPRTQLPTWPPEFKPLEILQKPGETVFVPGGWWHVVLNLDTTIAITQNFASSTNFPVVWHKTVRGRPKLSRKWYRILKQEHPELAVLADSVDLQESTGIASDSSSDSSSSSSSSSSDSDSECESGSEGDGTVHRRKKRRTCSMVGNGDTTSQDDCVSKERSSSR

SEQ ID NO: 60 - DNA, 18529 bp, Homo sapiens
  source 1..18529: mol_type = genomic DNA
agtgtgaaatcttcagagaagaatttctctttagttctttgcaagaaggtagagataaaggtaagtcttggttttccttttagttagttttggttgttttgaaaacttttctcatcactatgttaaatgttactgcttctacaggatttatggttagttgcatttaacatgataagtcattcataaatctttctgtagaattacattggatatttatattttaggaatcacaaattacaatatttttgttctacttagttaacaaatacaagtaaaaataagataagtttgcttaatactggctcattgtactcttggtaagttaccatgagaaagaagggaagaatgtgctttccctctggtagccttaaaagaatgtgtttttcctttccttccccttgaaatatttcttcccaagagctgtgtgttttacagagaaatcgtgatgggggctgctttttgggggcaagaacaaaagtgataggagtgggctgcagggaactgtttcaaaatagtaggactttcataatttattttcttcttttgtaaggaaaacaagatagattcagacctcaaagtgctaatcatgctctttgtaataaacatttaaaaatatatgttatatttgcttatgctatttaaaataagaaggtccgcttattacttttttcatttaaagagggtgtggccacattccttttcttgtaggctctgtgtcatatacagtcttttcaagtgctggctggaaaacctaaaaagaagggaaatactttctgggtagtgtcagatacattatcctaggggaatgtcagtgaggccctccaacagctattccacttgattgttgcatgagctaatggccataaaactccttagaaaagcacaaagcaaaactaaagaagagtatttactagtgttggatatatttgtaaaagtgagattacaaatcatgtatctggctatttttttcttaaacatgttccttcaagaatttttctgttcgttcattttaaatatttattaaatgttctgatttcttatgttcactgctagctaattaacaaggatggaatttttcttgccttggttatatctaaaagattgtaaaaactttgagaaagcaatgttgccctctttccacaggagtattttggtagctgtaagagaatgcacattgcaaatgactcaaatgtggtaaaatgttggtttcataattctgaaatggcctcttccccaaaagtgacagtaacaccctagctccaggctcaaccacatccagcacatagccaacatttaacagatgttgacaaaatagttaataataatattattaaggaaccagccagagtttcatgcttattaaatactttttcaaccagaaggtctgcaaaggttgatttctgaatatgacgttagctctctctagacctattaatttacgacatttcaaatcagaggtaaaccagcagacctattatttttcaatgataaactataaacagttttttgaagtcaactatttccttttcctttaaaattggacagaatttcatcaggaagctcagaacaatccaatttatataatgccttccttcattatgctaattttcttcatcttcatctacttgaagtaatatttaagattggcacttcagagctgtaaatggatcttagatgataattacttcaacattcttattttataaacgaagaccctctggagaagctaaatgtttttcttgaggtcagatcgccagataatcaagaaccagtatacttcaatttgtattttatatcctatagttgtgggtagaaaatgttcattaaattagtgtagatatgttttttaaaatattagcaatgatacatgatattcattcaataatacttattaacatcctaaattccaggcattttgctagggattggaagtacatacataatgaatattattatttgtatgttagcacgggcctcatggcctgctcctggggaatataaacaagccaatggaaagtgataatacagaaaggtggggctggtgtaggggtgaagtcaggatgctttgggagagcatggaaggtcaccgaatccagtgctgaggaactaatgaagggtttctgaagaacgtgatgagatcaatgctgatgagtcacttagaagtagcaattagttaggcaaagggaagtgaatgtggaggaggaacaagcattccaggcaagaagaacaccctatcgaaaagcctggaagcaaaacattagtgaggctacctttcataaattgctttctgtaagtcatgccattgtgtagtcttaattgctttctctcaccagggaaggtgtgggaaggacttgtgaaatacatattcgaggaaaaactatgcacaaggccgtgcatttaaaaataaactccctaaggctggggtgaaacctgctacggtctgcgcaagttgactgttaatgaatttgattctcaggtgtgagtgattaaaagaacactgatcatgtcattttctttttggtcactaattccctccctcccttctctttcttttcttttttcttttcttttctttttctttctttcttcccgacagagtcttgttatgtcgcccaggatggagtgtagtggtacaatctcggctcactgcagcctccgcctcttcctgggttcaagtgattctcctgcctcagccttctgagtagatgggactacaggtgcacaccaccatgcctggctgatttttgtacttttggtagagacggggtttcgccatgctggccaggctggtcttgaactcctggcctcaagtaatctgcccaccttggcctcctaaattgctgggattgcaggtgtgagccaccatgcacagccaaaatatataacactttggaatcaaaagggatggatttatgtctccattcttgccactactagcaggaagactgcttgaaaatagcactcagttttcccagatagaaactgaggataatgattaaaggctattattccaagcaagggttagtcattgctgttactatcattgcaaaactctgatagttctagattgtaaccaggaagatacaatcaaccacaaaactcagcttcctctgtcacaaattctagatagaggtagcctttcatgaggctgagagatggaaaaatgaagcggggggactctcttaggacacataaatatgcaaaaaaattgctacgctttagaaagctatacattcaaatcatagataagctgacattagtaggcagtgcatgttcacaaaaagaccattaattagaagaaatgtgaaatattgttaatttccttatagatttgcctatgtataaatggccaatttcaccgtcaatgagctcatgctaagtactgaaataaacttagttttagagcttatctttggttagttgaaatctgtattgagttagttgaaatctataagttgatagaacaggctctttaaaatctattgcaagctttatacactacaaacaaaaagatagaaaaaagaaaacctttcatgaactcattggcttaggcaggttttcatgcagagtgtaggtattgaagagtcagaacggcttaaggatagaatttggccaatatataaaaaaatatatatttggtatttgttagttgtattataattattcagaagttcagttaatacgtgcagttggctttgagcccttaaccagctgtatgtgataaaatctgtttcctttagagcaatttcttatatcctgccttgatgctcctgtctttaatctttgctaagagctggtggtgaatttggctgaattcagattccgtttttctctaattgatttcttgaagaaaattctctattggttgcttttctttcctagattatgcttttagtctatccaaatacttcaggctagaatgtaggaacttagaagatacaaatcacaaagctgtctcctctagggatgctctctctttcaaataagtgacttaaacaacttatttttgttatcttgtgttatgtaattaatataccttttcctgggctttctctggctttttttttaaatggacattattcaagtattttttagaagtaaaaaaaaaacagtacagtaaagtttttataacgtttattttgaagttgtcagagacacctttaatattagactggacaatatctttagtctttcttttgctttcttttgaagtttttatttgctaattgaaaagaatggaataataataataataataataaataaataataataataaataatataaataaataaataaataaataaaataaataaataataaaaacatgtttttataagtgatggagtagtactttgccaagtgatgaattttaacactcattttgatgattcttccttatcaaagccttggatgaaatgatgaaaatggaaattttgagtgcctgaagctgctagaattgcttttaaagtattgggtgtgccaattaagaaggtggaatatgaaactccatgtggcaaccgcaattgcatgaaactagactgtaatgggaactaaaaccttgtgcaaaattgcgggttgttactttatcaggaagcaattttaagtctatcaattatatttaggaaacaggctgctttaaatgaatggaaaaagtattggttcttctcacagatgacagaatagtaataagagcaatcccatgcgaattaagtggggatgatttctgctttggatattattttcttcatgcattcagtgttattacttgcaactccagttactttttagcaggtgaaaatggaaagagtttgtctgaacatgctgttgaggaatcagtttatggaatcagtttatgcctcatgagtcatttatcttcatatcaagaatttaaaactgccaagattgtcctcccaacctctctcacaaacattcatgagagtagtctctagaggggtgaaacagaatggtgtagatagacagatcagtgtagaccttgagcaaggcctctgaaaaacatccccagactaaaaggatctgtgatggcattttgtgtgtgtgtggccaaaacagagaacacattaattttcaatatacttaagatcttaaaaatatatgtctcattaaataaaaatattgccaagtcatgatagcaattcaagaaatttcctttaagatagagtttgccaaaagaacatgcatgttacaattgcacctctaggcttcctgctacaacaaaaaaatccagtataaaataattcttttctgggttttttgtgttgggtgggaaaatatgtaggactactatttagacagctcaaataggaagaaatgtgaagatagcaattacttcaatgctgagtacttttatatcaagaaatagaaaaggaaactaaattattcagggagaaatatcacctggatatctttttacaattaaaattttaaatctgaattcacttgtacagattggcacaagttattttaccttataaatgtaatcattggctgggagtggtagctcacacctgtaattccagcactttgggaggccgaggcgggcagatcacttggggtcatgagttcaaaatcagcctagccaacatggtgaaaacctgtctctactaaaaatacaaaaattagccgggcgtggtggctggtgcctgtaatcccagctactcaggaggctgaggcaggagaattgcttgaacccaggagacggaggttgcagtgagtcgagatttcaccactgcactccagcctgggcgacagagaaagactccatctcaaaaaaaaaaaaaaaaaaaaaagcaatcattaagcttttcatctagccattacttttgtacaggctctcattaattccacatagatggtctaatggtctactaaatagtattctaatcctccatcttgtctatctcttagccattctccatgataaaggatgaatggtctttcggaaacataaatgaaaccatgctgctttaaaaaaacaaacaaacaaaaagaaacccattaatgttttcccaaagctttgtggacacattgaagcttcttgtttcagcttctgccaacatttctcgctccagcaaactttcttctgcttcccaaatatgacaagcttcttctttaacttttctgccaggttaatcttgactcatttcaagagaggcttgggtcagccagggcctactctaagaagtttctttagcccttatgttttcctatggagagcacacactagctttaagtcctgagggtacttaagatgatatttcaatgtttttgtactcttagtgcttggcatatggtgggtggtctacaaatttagaacaatgtagtgaaccacaaactcctctcttcagcctgtgtgcttacttgtagtagttgtctgatctctaaaatttagaactgaatatgccaagaaagagttcaatttcagagaggagggtatggtttcattttaagtataaaagcttcctttaaaaaaaattacgtcttacattttgttatgctcctaagtgtaattgatcctggaaagtaagcgcaaggctactctctaatgctaactcttatgtatgtaagaggtgaggaaggagaggttgtgtgtggtgcatttgttttgtaaaagcatctaactgttttctttccagacactttttcaaaaatggcaatggtatcagaattcctcaagcaggcctggtttattgaaaatgaagagcaggaatatgttgtaagtagagtgataataaaattatgattacaatattgaaataaaaacgaatataagtaaatggccattaatttatttctctctcattcttagcaaactgtgaagtcatccaaaggtggtcccggatcagcggtgagcccctatcctaccttcaatccatcctcggatgtcgctgccttgcataaggccataatggttaaaggtaacgtgtttcctcaaaacagttccctcctggacatttcagaatggctatttgaatgactgtcaaaaaacagacatgtgcaatggaaagaatctgtttcattttgaagataaaaacatttctttgccaaacgaagatgtaattatttacttaacactgaggaaattgtgttcacatcagtggaatctctattgttacagcagatattactggctcatttctagcagaaattccatgctgaaattaaaagctctgttcacatatagagttgcaactagtatcaaacactgcaacactgagggccaggaaaagttaattgtctcttcctttctcactcgaatgaaatgtcattctcccaagtgcttccttgatatgtagtatagcatcgattttttaggctgatatataatttatatttcttaatttgttaagaagttcttttggagcatctcagtaatgaattattttatgtcaattgatgatgaagaaaattggtgttaaaggctgttggccctttatttccaggtgtggatgaagcaaccatcattgacattctaactaagcgaaacaatgcacagcgtcaacagatcaaagcagcatatctccaggaaacaggaaaggtaagttagagtggtaaatttagatatttaatttcagcatagttatacttaaccatggattcggaagcacagttacctagttctttaaggttctaaccactgttttctcattacatctatgattgggattgcagtgtttatccactttgttgcaatttaatcaattttatcaaatttcctatttttatacattagtcatcttggtgtatattgtttgcagatgtggtgctctggggacaaatttttaatttgaacgtaaacatcgagattgctgctgtcaataaagaatatggtctgattgaaatgtactaatatttaaactgaactgtttaatgcctaaattttatatataattctactttaaaaataagccttatgtcttttataccaaatatgagtagttttctaaagcaatgaaattagaaaactatataatttcagtatctgattatactgcttgttatttgagaagtacaaacctcaaagattggaaacatgaatatattattttaaaagtaattttacttctgttttctgttagcacacagtcctctgtgttttgatctttgtgatttctcccctgtgtataagattactaaccctatgctttaagaagttattgatgaattcagtaaattttattttaatccctctagatctggaagggtaagataatgtttcaaaatatttggtacactttgtatgtgaagggaagaagctctaaaagatggttgggtttagggatgagttgtacgatgacctaaagtcaggtaatatcacattttttaacctagcatgttacttattggaagtcctgattctaatctttttttttgtagcccctggatgaaacactgaagaaagcccttacaggtcaccttgaggaggttgttttagctctgctaaaaactccagcgcaatttgatgctgatgaacttcgtgctgccatgaaggtaaatcgcccaatttgagcaaactcctttcctcaagaggatgtattgggcaagtcacttatgcttatgttattttcaaaatctagtatagtacctgtcaatcagtgggagtttgaagaataaataaattaatacctcaatgaaggaattaatatataaatgaaaacagaaatgttggcactaacaccttccatgtcatgtcactatatgagtcatatatttgcatttttatttttacccaaaatattgatgataaacttgttttgttttagggcaatgtaatagagcttattgtaattattaaatgttgtgggtgaaatttactaaatgacagagtcaaacaaattttggaacaccaaaaactcattgatcctcttgcatgaagatttttttctacatttatccttttcttctcttcaaatttagggccttggaactgatgaagatactctaattgagattttggcatcaagaactaacaaagaaatcagagacattaacagggtctacagagagggtaagttgtaatgtccaacagtccaaacgccttatttgaaaaggaaatctaatatactttcttaaaattgactgtctatggtaattatggcagctttggaatctccacatatcaaaatgtttctttattgtttggcacatgtctattaaatgctgttaccaggcaacgcttgagttgctaggttgctgacaagggagatggtgtcccaatccgcatcaagcttgcgttttaatagaaaatgttcctctaggataaatggccacatacgattataatggaaacctcaattcagagcattgaatttttaaaaatttctgaaaaacacttttctattattctggaatgtattttataaaaatgtcccaaggtcattttttttgaaaagaatatataataacaaaaaaatctcctaacaaaatgtttttcatttgtccttgaaaaagtaaagaattaggtgcttataattctctgttggaaaccttaactttatcgttatgaacataagagactcactttatctctagttaaattcacagaataaaagactagtcttagcttattttatctctccagtgaagcatctcatttaaatgatgtgctcaacactgaaaagagggtaattgcaagtctcttaccattttcctactctcatttccctgagctgctggctttttggctttcccaatgcaatatatggcatatagaagatctttctgcttgattctcataccaagcatggagaatacaatagcttttgcatatcattttcagaggaatttaataaaagaataaaaataaggaagcttttaaacctcattttctgcaattcttatttaattaccaatgtttatgttagatccatgtgtcagtggtaataatgatgattatttttgtttgataaaacatagtttataaaaataagtgtttatatatttttcatatggccaagatataggccagtgatagtttattacattgcccagtttcaagttgttttagtccgtttgtgttgctataaagaaatatctgagaccaagtaatgtaaaaagaaaggaaatactgtacaagtagtatgggaccagcgtctgcttttgatgagggcctcatactacttctactcatggcagaaagcagacagaagcagatgtgtgcagagagggagagagagaaaaggaggtgccaggctcttttcaacagccagttcttaaagaaactatgaatgagaactcactccgagccattcatgagggatctgcccccatcatccaaacatctcccaacaggccccaccttcaacagtggagaataaattgcaacatgagacttggcagggccaaacaaacaatatgaaaaccatagcactagtcaattataaattcaattattttttcctattacagtattattttatgtagttaagcagaagtgtttacacacacataaatcatcaaactgcattacttataagacatttatagtttttaaactaaataaataatttgcattcaagcaagtacctcattttgttcttttaaacaattattttattcattctattgcttaaattctgccatgttgtatttcagaattaattactaatgtatacctatacaatttattcttaacgaaagctttatgactgtgagttttcaatcacagtattatctaaattgctcccattgcttcatatgaaataaattcaatgatccaaaaatttacctgctttaatttttctcttcttatttaaaaatgataatattttgcaacatgttccataagtcattgaacactgtggcactgtgaattttcaaccaacttagagatgtcagatattcttattattattcatcactggtttactataaaatctatttttcttttttctcagaactgaagagagatctggccaaagacataacctcagacacatctggagattttcggaacgctttgctttctcttgctaaggtacaactcagatactttaggaaatgcctcttgttttataaagactaatttcttagtccattttgtgttgctataagggaatatctgaggctaggtaatttttaaagataaaaaggtttatttggctcaggattctgatggctaacaaattcaagtttgggtatctatgtctggtgagagcctcaggctgcttccactcctgacagaagaggaaagggagctggtgtgtgcagagaccacatggcaagaaaggaagcaagagagagaatggggaggtgccagcctcgttaacaaccagctctcgtggttctcatgagcaagaactcattcccagtgacggcattaatctcttcatgagagatcagccccaggacccaaatacctccctctaggccccacctttaacactggggatcaaatttcaacatgaggtttggaggggaagaacatctaaaaccatcgcaagtaaaatcttgtatctgagctccttctagaaatgagtaatagaatacctttttctcaaaaaatattatttatctgagtttaagataattaagtaaatcatgcaattacatgctagagaagagcttacaatagaatgggatttctttcagggtgaccgatctgaggactttggtgtgaatgaagacttggctgattcagatgccagggtaaggaagtgcttacaaaatactgctgcagttcatcttcctaccttaagtggggctaccacatgatcccctgtgaaagcaaatctaagatcttctgagagaccaatggcttcttaatgttcatttcctgaatgaggcatgtctttctgtagcccccacacacaaaaaagtagtctttgtaagttttcaatatctctcattattcgtaaaaccagagagaactgaagaaggacaatacaaatttgatttgtcattcccaagaattgtttgttaaaaaaaactctgacctttcgttgtactaggtataagaaggggaaatgtaatttttttattatgtgcaatggaaagagtaagcatatttaacgttatttttaacagagaactttggaatggtttatagatgtcaatttatattgtcaaaatattactgcaatgatataacaagagtataggataaattataataatatatgctttctaacatattgttttatttagtttcagtgacattgctgattatttatatgccaaaccactggcaacataagaaaaatcatatcattttaaagcctggaatttccatttaaaacaaacaaacaactaatatttgcattatgccttctcatggaacagtattctctagagaattcattacagtgcttcactaaggatagagatttctttgtgcacccccatccacttctgctataccagtacattatcatgtacataataggcactcatgaactttttgttcaacaaatgcatacatatcagatcaatttgcttgaaaaatgcaaaataatttttacatacattgaaggttttatcattttaatagaaattgttcaagcatattaaggaacaagagttagcatttgaataattgcccataataaaaaattcttatttgcttttgacatttctgaatttgctttccattttaagactatcagggttcttaatatatatttatggaggttacatggattagtgtgacccaagagaatgatggtagtcaacatttcaaagttaataaagaccgcttgtgacaatagggcagggattatatttttcatatataaaagaaaaaaatctgtcatttagtaaggttgatctatttgtctaagattatgcagctttgaaattgcagagtcagaatttgaatacagaaattctaacatcaaaatgcaaggtccaggttacggttgaattattgatttataagtaacatttgctgataattactttgaacaacacagagtaaaaaatctttagagatccccttggagttgtcttactatagagcataatcttaaagcaatttagttcagcaaacatttattctgcaaacatatattcagactctagtgtttacaaggcaccttgagagaaactgtggaagatatttgacaaacaaaataaggtccctatctttaaagaacttgcaatcttattgttgactactctgattgtattgggcacaaagcgattgcctatataatctttgacaaggtctaacattattgtgcagatatcatttcagcagatagtgaagtgtttacttttgtgtttcttgacaggccttgtatgaagcaggagaaaggagaaaggggacagacgtaaacgtgttcaataccatccttaccaccagaagctatccacaacttcgcagaggtaacaataaatttctttttctggaatctgtttatggaagatgcaattttcttttttgatgacaaataagagaaagtaaaaacagaaccctttttcaatatcactcctgtatcaaacagatacagtgttcctgacccattgttatttgtcaatttgtccaattttgtacagccgctactttatcatatttaatacattttgtgacttgggcatgtggaacataattttgttattttcactgcttttactcccctaaaagatttggaatatgtgtgggaaaagacatgcataacagaacaaatgaaattagaatgaagaaaaacaaaaaaaaaaaaacaaaaaaccctcagagctaaatgaagaaagaaatatgtaggtgctttggaaaaacaacaacaagacaaaactcagaaaaagtcctggcctttgagtgcaagatttagctctgggcctcttggaagtgaaggcgatggaaaagttatgacaattaccaaagttcaccatcttataatagtatactgatttctactgttaaatgtaagagaaatttagtgcacaggtctttatataagggaagatccatttgctgtggctcttagaactgctgtaggaagtgctatagttgtcaatcacatgccgtttctaataactgtcaacatttgcaaacatttcgccaaaatatataggaataccaaaatggccaggtaagttacattcctaggagaggatgaagtattcacgttatgattaattgggtatattgctttaaaaggtgtagccaaagttgttattctaaaaaattctttgagtcagttgccttgattttgctaaagctttctaaagaaaaggatgttttgcatgtatcttagtttgaatttaatattcagtgtttcagaaatacaccaagtacagtaagcatgacatgaacaaagttctggacctggagttgaaaggtgacattgagaaatgcctcacagctatcggtatgtagtccagcagttgaaagagttttctaactagaaattgtattttcaaagctatcctatacttaacaagaacaacagcaacaaaaccaataaaagaaaacaaaaaacaatcagaagtagtgcatctgtttcaattgaagcaacgtaaaagattggcaaagtactataaccttaataacaatagatattattccccttttcaaaaatagagagagatagactatacttattgagcacctacttatatcaaacaatgtaccaggctgggcacaccacagaggcaattcagaatggtcactgagagcatgggatctggaataaatgtaacatctggataaatgtaacttcaagtcctggtctactgcttgttaattgtacaatcttgggcaggtccaggagagtctgattcagtgggtccgagttggcctctaaaaatcggtactttttaaagatctcccaggttattcagacaaccatcagggttggggaacctatgttctcaagcagtgtttctcattcatgactatgcacttgaatcccctggaaagcttgttaaaatgcagattctgattccccaggtctggggtggagcttagattctgcttttctaacaagctccccattgatgccaatgctgttggtccatagatctcgacaagatgaagaacactatgaactggaatgtgctagtattatttgggttctgttttatatttaagcccatcctatcccagagttttttcttcatttattcatttatttttacttatttgtttgtgcaactcttactttagacacagaggtacatgtgcacgtttgttccatgggtgttctgcactcaggcagtgagcatagtacccaataagtagttttttgaccaatgccccttctctccctgccctctctagtagtctgcagtgtctgttgttcatagggtgttctttttaaatgttcttatagtaacataaataaagtatttacataggcttgaacacctagtggcttctccactcccaaggagaatatatgttggatagcgcaaactactgaagttgctcttgagatgtatttaaggtaataaaaaaattgatcgtcagggaaaagaatattcaaaaccaccatctagagagtcacaaataccttctcagaagttaactgccctatattgggagatgagaggtgaagaatgatgatgagggatagaacactgttggcaaaattctatatttcctgtttctttcatatggatatttcatttttttcatggtaaatacatcaactaaaattttcttctctaacagtgaagtgcgccacaagcaaaccagctttctttgcagagaagcttcatcaagccatgaaagtatgtaccattctacttatatgtcctgcttagaggaagaattatttgtagaaagaacagaaaacctcatgttgtttgaaaatctcacatttaatatcttcccattaatgagaatcattgttctatttgatgaaagaggtaatacactaccttctcagaataaacttctgttagattcggtgcttttttttacagatgagattgtaaagtgagcctgtaagtgatttacggctcacttgtgatttgcttaaaacatgtgtcaccacgggaagggtgatgtactttcttttttaacgtgtaattttagtggcctacttcctctaaggttgtgagttttataatctcccactttatgagtctgatttgttgtttttattattctgtcttttatgccacagattaatagttgaaacttttgaaatgtcattctatgattaaggatgtagaatgatgtatttgagatcaactatgtcactttaactttactgtctgacatgcatggtattatacaaggtacctcttctattctgacattttgagcccacaaatgaatagttatgaagttatcttccttttttctttgcagctccaaaataaggaggttttcagagagagagagaaagaaagatctaactatttgaataatatgaaggaatattttgaatatatatgaataatttgaataatatgaaatgatagacatgctaggtactgctctgtagtggttagcatagttgctgccccctttctgccatagtctagtgtgatatttcgttgggtaatgatgaatacctggtgccatggaagagaaaagtgggacatatactccagactttggaaatccaggtagcattgctgtcagctaaattaacacctgaagtttaaatagaaatgagccagatgagggcaagagtggaagagatggggataaagcaagggtggtccaagaggaagaagtaacccacacacaggcttgaaggcaaaaggtaacataaccttctcaagacagtaagtatagagtgatggtgcacactggaagagatggtagaattaggcaggatattgtaagccttgaaaaagaattaggcaggatatcggaagccctgattagattctatcctaagagcaacagaagatcactgacagtgttttaaatagatagactagtttattagatttgcagtttagaagttccctttttttgtaattattggacagtgtagagaccggatggtgagagatgagttaggaagttgtgacagctctctatacctaccgctaatgtagaggattatttattttcatttcattaccattcgtgtaaggtgtgtgtgtgtgtgtgtgtgtgtgtgtgtgtatagctagtttctctatagaaattatatggaagagtaagaaggcttcactttaaaattcatgtttttaatgagagtattttctgaatatgagacacttaccctcatttattttggccagggtgttggaactcgccataaggcattgatcaggattatggtttcccgttctgaaattgacatgaatgatatcaaagcattctatcagaagatgtatggtatctccctttgccaagccatcctggtatgttttgattcctctaatgccatcccaacaaatgaaagttctttttgcaagatcttcaaggagaagagttgacttattgtatctataaatttaatatgtaagattaatttaatatattatggtgtatacttcatgagtaaattgaactttcactggtaaaatctactagtgagttctctactgaaatactgggtacatttttcaactaaagtcatggaaacatttagtttcccatgcataaattcagcaagcagaatattctagtgttccccctagggtagatagacattgtggtttattttgccattaatatttgtcagaggattagaaactccttattcaaaatatttatcttaattctatcacatgtaaaatgtttaaaatttatgttcaaattgtctcataagaatgttaaaaaataagacaaagaacagtcaagggttttggacttactgaaaggtagataacgattcaaatttaattaattagtcatattggataactaaaatctacccagaaaatgtgagaaaattacaggcactatacatttctcttcttctggtgagtgaatcaggtatctcctcacataagatatgagattatattgtgttatacttatttaattttgtgtgatatttcattcatagaaaataatggcactaatataaaacataattaattcagaaaagtttgtaatctcagtcttgaaggctattgcttttttatgcaatgataaaaaatcagttatctgttgtatatattgtttaattaagtgaatggtaatgtgtaatctcatctacagctaagtctaaaaataattcttctataagtaaaaaaaaatagagaattatggtttcgactaacattaagtatacctttttttgaatcaacaggatgaaaccaaaggagattatgagaaaatcctggtggctctttgtggaggaaactaaacattcccttgatggtctcaagctatgatcagaagactttaattatatattttcatcctataagcttaaataggaaagtttcttcaacaggattacagtgtagctacctacatgctgaaaaatatagcctttaaatcatttttatattataactctgtataatagagataagtccattttttaaaaatgttttccccaaaccataaaaccctatacaagttgttctagtaacaatacatgagaaagatgtctatgtagctgaaaataaaatgacgtcacaagacaa

SEQ ID NO: 61 - DNA, 50836 bp, Homo sapiens
  source 1..50836: mol_type = genomic DNA
gctcagcatttggggacgctctcagctctcggcgcacggcccaggtaagcggggcgcgccctgcccgcccgcgatgggccgccagctagcggggtgtggagacgctgggaagaagggtacggcctggcagggaggccccggcaactggccccggaggccgtcgggggcagggggctgaagggacggccggcactggagagtctttggggagggggctcagggacaaggtgtttggggcaggggtgaggggccaccggccctcgggccgggagggtgcagggcagaggtggtggggggtcgggcttctctaagaagccctagcgggagcggggcgaggcggcgtggggagaggggcggagggaggccccgcattccagacgcgccaggcgccgccgaggcagggcgtggccgcccagggagccgcaggtccccggcgcagcagtagcaagtgggctttccactgccctctagaaagtgccccccatctgctctaagttactgtactcgaaacaaacgcgcgcttgtggagttgaaccgaccagcaggagggaagtagcgggggaagacgagaggggggagtgtgagtaggcacccctcagccccccataaaagaagacattaaaacgtcagttattccccttgctctaggttatcttgtagcatagcaacttcggatttcactctacccggagagtttcccgcttggttgaacacattggcctcaggaaggtagtgtcccccatgattctgtggggagggttgtcctgttactcgccatgatgtgacaatgagtcaggaactgagagtagagagaagggcgtggccccggggcctctcccttctggccgctctgtgcagctggccccactgctggtgtggagggcttgggttccatcagccggctgttgagaagaaggaggggaacacagataagtttcctcatctgggaaggtggcttaaggatgcctattcttaccaccacccagagttattggagatttcaaaaaacacagtcattaggtaataaatgtgtaaagtacacaaaaaacaaagtgctgtgcaaatgcaaagtgtcatttttgtagtaagattgccgttttaaagctgtgggtgttctgagtgcgtgtgtaaaagagcagtggcctcatgggtgcacgctgggccattaccaagaaccttaagttgttggtgtgcaaaggcctgggccccagactgtactgatggattctgttcacacgtgtgtgctactgtgcctgtctggaacttggtgacttggaatgcagaatgcactttcccactgaaacagtgttgcagaaggtgctgacgttcccaggctagccctgaaagacctttttaacatgcactgcctgattatgggattggtggtggggaggtggagggtagtgaggggcaatgtgtgtgtaggaagactaaatcactgaaatatttttctggaactttttttagctttaaggttgacactgagtaaattattttaattggaaaattatgtctttgcccctgttccactttcttttttccaccttccacctccttagagacgctcttctggctcttccgtgacgcattacaacagccatccaggccggtccagttacgctgcattccttcctccttcccatttcggcggacctgcatccagctagagactagcagattgaatcgatattcattaagttaggaatggttggtggtcctaagagcctcagcaaccgagaggagtcttgttatttaaaaaacaacgatactgggcgtggtcgtgggcctgtagtcccagctgctcaagctagtggatctcttgagtccaaggccaatgtgagcaacatagcaagacccagtctcaaaaaataaatacataataataataaaaaaccctcgttcacctaaacagatctataatttatagaatgtaaagcagcaatattcaggcaatattaaggaagatttttggtaagactggggcagcagaggtgcccttgatgggcaagggccaggagtgttaacacagtcctgcttagtaatttcttcccttcttccaagtctgtcgattatctaaaggtcaagggtttgtccaaaaatgtcccttgcatctgcagtggaaggatgtgacatgtatgtgcatttttacaattggaggtttgtgatttggagaccgtttagattttgtaatttcccgcagtgccaactagactgcctgtggtaaatgcccaggaaatattgctgactcactgactttgattaggagctcagtcttgcactggagtctcaatatttagcatcttgtgtctttgagctattaaactatggtattgattgacattaggctcgcagtcatggccgttagtttcctggctaatttctgatttaagtagttttcctggcaaagtagatgtgcttctataattgctattgattttgagggctgtaggctcttcctacaccactgggcctagaatctggcactaatgcattgtctggagcctttgttctcacccttcgcttgtgcagagcctggagcctgcggagacatttttcattaaaggagagcgggattgtcacaaaaggagtctcaggctctagtgggctgctttaaacaaccatttattccacaaaatattaattacctactgtgttccactcatagttatgagcactagggatacagcagtgaacaaaacagacccccgccaaaaataaaatccctgctctttagaccttaaatctggcggagagagaaggaaaagagacaaaataagtgaattgttggattttaaactttatattttcccaaattaatactagtttctaaacttggtgggagttcatttcccctttaatccagctgttccacagacctaaacttcacattttacctacctcggggaagttttgcttaaaattatggtgtcttaagctgccttccagattcaattgtgagaattaaatagaaatggaatgttcctcttttttttcacatgagaatcctcttcacttgccctggtgccacaccctattctagttgtaggccacaccagaggaaattccagtccttcaaaaaaattctttccacccattcactgcctggtatcttttttcttctgctgttgccagaggcagtcctcatctactttctccagggacaggtcagcagtaggggtcaggagatgcccatatttgtccttctgggtggttctaccagatgacttccaaatctcccttctagggtacaccctgaagctgtttttttttttcttttttttttcttttgagatggagcctggctctgtcacccagcctggagtgtagtcgcacgatctctcctcactgtagcctccgcctcccaggttcaagtgattctccagcctcaccctcccgagtagctgggattacaggtgcctaccaccatgccgggctaatctttgtatttttagtagagacagggtttcatcatgttggccaggctggtctggaactgttgagctcaagtgatccgcctgtctcggcttcccaaactgctgggattacaggcgtgagccactatgcctggcccaccctgaagcttttaatccagctgagctcaactggacaggtcggtagcacccaagtggcctgagttttaccccaggtgtggtgtagaaatttcttattctagggagtgactgtgttatggagccctttgtccatgtcctttgtctccctgccacacccaggctatacactcacagctcagaggaaatcagagtcctaaggccactcgtacatcctgcctctttgctgccttcttgctaggagttgtaggttacgttcccatgtggtcctatggacagagctagggtccaagtatccctgacagcacagaggtggggggcatggctatatgttgataagaggctgccctgaagcgacctgctgggctttgctaagatttgcagaagttggtgatttaagcctccaactctgaatgcacggaactggaactgcattcgaaatgtccagtctgagggagagagaaaattgaggaaggagagtgtgttggaaaagaagaaaaaaagactttctaatatagaaagacccagtgtgtgtaaaccatcccaagatgaaattgaatgcctatcgtgtgccaggcactgtgctcagacctatgaggaaacaggagggagttaagttggaaaccctgtgggcggataatacggaagacagactttacacatgtaactctaatgttgcacagacacacaaaaagctgcagaagcacagggcaaggaggggtgtgtgagaaaggcggcatttatgatttcctgtatcctaaagactcattcagatgtcagctaattaagattgaggttcctggtggagggaacttagaaagtgctgagcgtgtttggagaagagttaacagtccagttaactcttctgtgcaggatgcgtgtatgcatgtgtgtgtgtatagaagatatttaaggaaaggtaggtaagtccacagtgtggaaggtcttgaatgctgacattagacttttttctgtaggcggccaggccctgttgaaaatacaatatgtgggccataaaacactgaaattgagttgcagacttgaaggcctggatttcccaaccctgaaagtgcttcatgccaagtgacatcattcttcctgccggtctctttccacccactccaaccccagatcaggataccagcagagagaggctgtgagagcatgaagctgcaacaagtcagtagggagcaaacaaatattgattcagatcaggccacagaagagacaagctggagcaagtgctgtgtgtccctcctgctcagtttgatcgaggtcactgggccgaattccaggaattctggggaatgagttggccctgtgactcagtcattaatcaagaccataaaaccaaggagaagaatatctgctttcaaaaaggttctgataaataaagatgcagtaggtgggtggaggatggagtacagtgggaacccctctcctcacccagtacatttttttttttttttttttttagtttaaaattccagtgtggcctgtagactgtgtgtccaggactgtgtacagtaagagctttgatggagaacccaactctccacactcccacctctacccatttttgctttaaaatcttcatttgaatcaccagtccctgattgattcaccatggttgctaagaatctgttttgcggtaacgcatcaacactccacgtttaaactgtgaagtgggtgtgtccacaaaacttctggattagactcagatttgcctgtgcagaccagccctgttgcagtatgtttttgtttgttcagattaacatttgggctttttggaactggttcttaatttagttcagtagaatgtgtttttactatttgaagtgttgacttttaagttttcttttgtttgtttgttttaacctttttgtaaacttttactcttctttttgggagtaaagttaaaactgcttcacttgtcctttttttgtttgtaactgcactttcgtagtgaagcaatagaatacaataaaatctatagagtttttttttttttaataaggacaaacccttaaattattaggttggtacaaaagttaattgtggtttttgccattaaaagtaatggcagttatttttgcaccaacctaaataatatagtccttatgttaaatgtaaatgacttgtttctcaataactgcactgatttcattaatgatcagccttgcactgtgagcttttttagccaggcattcacagtctcatttatcagccttttcaaggcagaagaaactgttcttttcattagggtggggccaagtgacctgttttcctacccaagtagtgaatgattttaaaccagtttgaggtgggtatggctcttatcagtgagtctccctgtacctctagtttatttccttaaacagaaaaacgttctctgataaagggtcattttaatgatgttgtctagtgaccctgccctccctgggaatggaaggcacggcactgatgtgtatgtagatgtactcatcaacagattgaatttgctgatttttttttttttttcttgttggagagttgaaaccagtcggcaagctgggtgaggttgaagtgttggaaagagtggtgcaaactgccattttcatgttctttagagaagtctgccagaaaaggagtagtggttctgtttttaatggatttatgagttttatacggtgatgaggagtgagtagaggtgaaattgtctcatacagcatgtaggctttattttttattttcattcaaaacagtaagtacactgaagtcagagtagttgttttcagtaagaaaattctgcctccagagcaaatgttttggtgaatagataaatatgagtactgagtcccaatcattttggctcataggttccccagtatttccataggcaagcttaactttgcaccattcagagacttatattttaggttccccacagggcaccccactggacgtggctcattttccagcctgtagtcttgttcttctgccaccctggggcattattcctcttcccctctccccaggccttcccccttgcttcttggctggaacctcccatggtgattcacccttctcagcctaggcagacagcacctccctgttaagcccttaactaatcccgctctgatggctgtgatctttctctctgtgtcttaatcacttggaataaagaaccattgtggtgaggttgaaagggcattggcccaggagtctggggatctgggttttggccctgcctcagctacttaattcactgggtgaccctggactagactctcagtgtgtcacagaggcacgaagggaagagagctcaaaggtcctgcagggtggaagtctgcatttcacagttttataagtgtcttttgtatcctttaatatagtgcaggctcagcgtatgcttggtatgggttcgttgattaattccttgcgtattaccagtgtttgtaacctacagtagcactgccaagacttccttttcctgctttcaaggatagcagcacactgacacattctcattagtcaaatatgctatattaaactaatgttttaacaaacagtgaatcgcaaagccaactgttccttccagcgaataatagatcatatgcaaaatgactttgcattgctaggggatttgatggagtgaagaagcaagcactgtattttatttctttttattttgttttgttttttggacataacctcaagattttattgtcctcataataaaacaaaagatgatgcttagaactggatcacttggccctttcttttgttatctcctcccagttgaaaatgtttgcatgtcttaacagccagcattttcttagatctgcagatggggtcagcacactcaagcctcagcacaacctcctttgtaattttacccgttttccagaaaattgccttagtctacccaccatagtcactctgcttcttgtcataacgccgctttccctgggcatacagggagtcctggtattgtgccgttttgtggggttggtgcttgccacacttcttacagaaagcccagtgggttttaggaatgttcaccatgttttccggaatgctatcggcatgggaggaaagtggccatattttatttctagggtgaaaatgtttgccattaaactcacatgaagtaggaaatatttatatggatacaaaaggcacctgcatgggataatgtcaaatttcatagatactgctttgtggtaagtgtgactttgtggttattgtgatgtttgtgttttgttttttttttctgcaaaatggttatacatagtataaatgttatgcaaaatagcaactcattgttttcaagttgatttagcacctgcattatgtaaagataatctgaaatctgtagggggactgggactatgtagggaagatgaggtcaaccatatactttctactgctttgaattgtacctatgcattcaccatttgaatacttggcacgtgtagggcacttaaaacattctgccgaatggatgaatgaagtggtatcaaaaagtgccctggcagtgaaaggcaagatagagttctgtagagtaggggtcgtggtgaccctgttggagcagatactgaagtagtggtgagtgcggagaggcaagtcacattttggccctagtcaactgtagctgaggagtaaacagagggaactgtttactgtttacaggattctgatgctcatctttgaaggctgggctctgctggaggactgattttgaatgatgtcaaatgattttgacaagattaaatggggagatttagttggtggtggcatgcaggactgatttgatgaaagagcagcacagttatgaatggtgaaaccgaaaggaagatttgtggggcttttaacagtctcctcaaggtgttgtggctgtgggagaagaattaacatgaatggagagtgtaaagaagcctatcagattgtctttgatctgcacagtactggggagtcccatgtgggacacgggtaggcagcagtctacaaagctcagagctggaaagacaacttgaaagaacaacacaatgaaaagttaccgtgcctctagttgagattttctaaacatcggaaccaatgtgaggtgtctgatttcataaacaagtggaatttaatctatactctctaagtggaaacaactctgtttgcaactctgacttgctagttccctggttttgcttttgttttacgtttggcattttttatttcttgcctgtttatggtagagactagaattctgcacagcagatgacaacagtttatcccctgctgcagacctggtccagttctgactgagtccaggggtgatagttaaggccagggcttgggtggtttgatgtccatcctaggagtttcacctctgcttcggtaattctcgggctgagggatactgatgagaccctctagaatgtttcttggtccatgttgaagttagagatttcttgctctgtcaagaagactgtcagcctgggcaaggtaacgcgacattatctctactggaaaaaaaaaagccaggtgtagtggcacacgcctgtagtcccagctacttgggaggctgaggcaggaggatctcttgagtcctggagatcaaggctgcagtgagctatgattgcaccactgcactccagcctgggtaacagagagagaaaccctgtctcagacaaaaaaaaaaaaaaaaaaggtctaggtgtggtggctaacccctgtaatctcagtgctttggtaggctaaggcggagggattgcttgagcccaggaattcaagaccagcctgggcaacacagtgggaccttgtctctactgaaacattaaaaaaaaaaggaaaaaaaatggaaaaaggaaaaaggaaattaaatggaaataagatatattcaacatatcatagttgtaattgtaatatatgatcaatatataaattattgggctggacacagtggtttatgcccgtaatctcagtgcttggatcacttgaggctaggagttcgagaccagcctgggcaacatagcaagaccctgcctttaccaagaaagaaattataaatgagaaattttatataattttttcatactatgtcttcaaaattcagaatgtcctttacacttatagcacatctcagtttgaactgaccacatttcagatgctttgtagccacatgaggctggtggctactgtattggacggttctgctacagagcaagactattctaaattgtctttttttttttttgagacggagttttgctcttgttgcccaggctggagtgcagtggtgtgatcttggctcactgctacctctgccttctggtttcaagctattctcctgtctcagcctcccgagtagttgggattacaggcgcccgcccccacgcccagctaatttttgtatttttagtagagatggggtttcaccatgttggccaggctggtctctatctcctgacctcgtgatctgcctgcctcggcctcccacagtgctgggattacaggtgtgagccaccgcacccggccgattgtcttcatttttaggaaagttttaggttcatggcaaagttgaatagaaaatacaaagaatgcccatgttcccctgttcccacatacgcatagcttccactgtcaacatcccgtatcagggtggtacatttgttagaactgatgaacctacattgacacatcgttaccactcaaagtccatcgtttacattagcattcactgttggtgttgtacatagatgcatccaccattacaatatcagatagaatcatttcattgccttaataatcccctcccctgaatccctgatctttttgctgtccccataattttgccttttccagaatggtatgaagttggaactatacactgtattaccttttcagttggcttctttcactcagcaatgtgcaatttaggttcctctgtgtcttttcatggcttgatggctcatttcttttcagtgctgaataatattccatgtctgaatgtaccacagtttatttctagagcaatactttttacaaaccagaattataccccaacggtgggacaaattggggtggggaggctgtctgagagttgtgagtgtgggggaagtggaaggtctttgactgacttttcgctgtgcataaaaagcttctgtgagcatcaagaagagagtagtggtctgggggagagcccaggatgagaatcttgcaaaaatacatccttcaccacaactaaaggcgaatcctctcctcttacatttccccactttcttcccacaccaggcctgggatctgcttagtccaaaatgttcctataagttagcaaatatctatgtcacatactctcgccaaaccagttttatgaaaatatttagactaaacaaagtgaagagaatagaaagctgtatttgcatgtgtgcagtttccttgatcaaagaatattaagcaaaaagagaccaaagcaggagtcactgcaatttaaatgtcgttcctgtctatttcaggacgcagctctactctgttttctttattcttggggtgattatgttgatgacctgtcttgtctctgttgagataaatttaccaccaattgagcactccttattggcagggattgggtgtatcaattccgagaactgtatgattgcaaaggtggaaagccaattcatcaggctattgttttgctgccccattaagtatattaactggaagatgacttcatttcaaccatttcaaatcttaaatacaacagattcagtcctttatggaatgagttaaggtcagaaaatctgtccatcgtctttctcataaatactttaatatcttccaagtatcattggactaagaaagtaattatgggtaataataaagattccaattaagaattagggcaacatgaaaatgctactaatttcgattcacatcgtagctttcaggtccttctcaatatgtttaattacttgtgagaaatacagaagtagtggctggttcggcaagcccatcaccttttatgagaagtagaagactcagttttatcctgtctgaacaggttgcattagccatggggaacattttgtttttgcattcacacatcagtctccccaggttctgtttacacagaggaagagaaagactggctagtttagtagtccatcccaacccaaggcagaccatctctgaggtttagtttttacagtcgtaagatgggaattgcatctgtttgcaaaaactactccaatatcgtcagatgaaatggtccaaggagtagaaattagcataatgaatcgctgtgcttcagagtaaaggagagcctcttcataaagactttttgttgtactttttttccagcttccttcaaaatgtctactgttcacgaaatcctgtgcaagctcagcttggagggtgatgtaagtatatcactttcactttatataatttttgcaagttggacatctctctggataaccatattactctctatccttgtacatctaaggaagatggggacaattcagacagtcatcatttggttctcctctttcttaatacttcagctgttcctagtagttcaatttgaaggaaatatcatggcactggaaacttttcttggcctcacattaaaattggacagaattagtgacactggaatggctggaattttattctgccatacttagcatgtcattggtaataactgttatgatggtacatgacttttaatgtcatgtcctgggattttattactggttggcataagccacagccatatcaaaactaattctgcatcttttggatttcttacagtgtccaggaagttattccagatgaagacttatacttttattttatttattaatttattcattttttgagatggagtctcactctgttgccaggctggagtgcagtggcgtgatctcggctcactgcaacctccacctcctgggttcaagcaattctcctgcctcagcctccccagtagctgggactacaggtgtgcaccactacacccagctaatttttgtatttttagttgagactgggtttcaccatgttggccaggatggttttgatctcttgacttcgtgatctgcctgccttggcctcccaaagtgctgggattacaggtgggagccaccatgcctggctcgaggacctatactttaaaaaatttcacacctggaaaatattttctctaaaaaagctaggatatttcttttaaaaaaccaagaatataatgaaattattgtaattcatctgtttcctttttttctgtggctattagggaatttagaactaaactgaattttctttcataggaaatatgtgaacctagaaattctgttgcatttgtttcttttttttacaaataaaaaatttaagctatatgtgaagttaaaattatttcaaatacttttagaatcaagtggaatataaattatgaatatgtaaaatagctaatggtactatacatcttccaggtcatcctggcagaaatggcttttacgcagactcagcactgatactggtttgtagccatatccgacagatctttcaaaatattctttgattgaaattaaaatgcaatgaatcactcaacagagggttgacagtgacttgggtcacatggtgcaagaccctctgtattgttcatggtacttgccatcaaaatgttcaaattaatggagcctgtgaaagcacaggttgtatggagtataaagcctatagagtttttttaaaatcttttttcttcttgaaacgtgtgcatgctgtttttgggaacaatacaaactgcatgttgaagtcagacaaattcaggtgctaaataatttgtttctctaatggacttagattgtatttgctatcaggttttataagagggctttttgtgtagcctctgaagttactctagtatatttcttatgtgtggagaggtggggcagaaatagaaaatgtcacatgttccccattattttaaggaaagaaaagataactttgtctcactaatttcatttcagacaagtggattttataggtaataggttcaattctcgatttaatttcatttccagagacactataaaatgacacaaaacttttccccctcactgttgtttttggaacaagacgacatatctcctggtaaatgcagtcatacatgatatggctcaatgcctggactgcctgccttgtaaataaccgatggcactcttaataaatgggaaaatgtttttccttagatttcatccacattttatagctaccatagcaaacacactgagtatttcaaaatagcactttgcctttttcctgaatgtgtgctccatgtcatcaagttcatcttactggaaagtttaagtggtgaaattagatggaacatactttgataatgcattgcatgtcaggttataaatatgaactggatttaatatttggccaagatagtcctcacaagtgcgtttggaaacatttgtcaaatgctgaacttagatttctggcctctcctgggagtcatctagatataggaaggcatcttagatgctcacctatacagtctcagtgctaataaaatggaatggcgtgggtgctgggtggtttataatgtgatgcctgtgggtggagaagtaactcacggatcttggccttttcactcttcacagaaactgcgccaaggccaagtcatcacattatacgggcattatgtgctgggggggttggggtgggttgcaggatgggagccttgatgatgaggatgggcagtgatgctgcctccaccagccatcagccaaccacaaccacaatgtacatcctctttgtctgcccttagctttgggactgggtagcagggagagggaaaactataagagcatttcaaagaaggagggaagttaataccttgaaaggagaactgacgtagaagcactccattgtccttacctcaatctggaatgggagattcccatctgtcagatcaggaaggataatgagctttgaaaagcactgaaaggctgggcgtgagccaccacgcctgtaatcccagcactttgggaggccaagatgggaggatcactagagcccaggagttcaagagcagcctgggcaacacggcgaaatcctgtctctacaaaaaatatgaaaaaattagcccggtgtggtggcaggtgcctgtaatcccagatactcaggaggctgatgtgggaggatcatctgagcccaggaggttgaggctgcactgagccatgatcacaccattgcattccagcatgggcaacagagtgagaccctacctaagaaaagaaagaaaagaaaagaaaagcattgggaaaggaagagggtatggtttagaaggcaataagaaatcttaggaagagtggagggtggtaggcacaagggatggtattaataaaggcagagggaaggatacagaggagagggggggaaacacaaggaggatgtgggccgtctggccagaccaccttggtgccacagtggtgaccaaagtaaagaggtgggagaagctgcttccctcatttatctgaattgtaagctcagcaacactggcccagtagaaattcatgtacctgtagcagaaacttagctaaacacccttgtccttgaggcatttccacattttcagcttatttcgaattgttgccagcccagtttaatggtcttcagagccatcctgagtaaatgctggcttcaggtctccagctttgcattgtctacttttgatctctcactaaaagtaagatgagaagttgaaattgagacagcatattctaaactagctgagcctttgaagaattcttattagaaaaaatgaaattgcttgcgtgaagtgtgatggtgtgttaatacctacctagttacctagtatgagaatgatctgaattgttaaaagaaacaataggaaaacatattaggcattgttatttcaacaagaggattttaaatgtgtgtcatttgagtatgtttatcttttaacctcagcactctacacccccaagtgcatatgggtctgtcaaagcctatactaactttgatgctgagcgggatgctttgaacattgaaacagccatcaagaccaaaggtaggtgatacatttgtcctcttcttgtcagggtcttactgagacatttttggttgtctctttattctccctcaaatcgccatacgttggcgatttgaaattgtcatcgagctttaatggagtagatccagacctagctcaacccatgcctcctttccttccttccctccttcctttctttctttttccttttctccttccctcccttctccctttcttccttctctccctctttctctttctcccttcttcctgctcttccttccttcctccctccctccctccctcccctcccttctttcctttcctccctcccttccattctttcctcccccaccccccgtttcttctctttggagagatgtacagcatgagatagtattttaaccaagtaatggttaaaaggaatcagtctgggagccggatctggtcctaggggtatgcttttgggtgcagctcttcactttgaggcttcagtccctcttctgcaaggaagaagttggtcatagtggtccctaagggcattttttgttccaagtcccctttaatttaattacatttgctgggaaaatcttactgcattgctcttagattgatctagagagtgaaaaattcagactttttttgttttttttaaaccccggtaagttctgctgctccttaggcctggagctggaattagaagagctgtcagaatgagtgtatttcctcaagttctaggatgagtaagagaagaccaggaggcgtaaaagccttcctcttgaaataaagcaaataaagtgctaactggttagggttgagcaagagcttcttatggtcattatattgttttctgggtctacaaaataggatgttcagactttctgggcttatattaattaagcaatccttggggttgtcccatcccctgaatccctgaaaaatattgcagctctcgtggtgacttttgtgattctccacttttccccccttggataaagcacttcctttcaccatgaggccagattgggatgcagacgtgacccagcacaattagagctgctgctggttcgtgcccctggtgaagagccatgtcacatttttctcttctatgtacagcgttttaacttactgacacacttatatagttcacatacggttcgttgaaagactgagaaacctcaaccaggctgacctgggaacctataactaggatgacgtcctggtttatgcctgcgtatttactaatagtgcacctttcactctcagaactgtcttattttggaggatacattacatggtcacctttcctaaaaccatgtagaatctggtgaccttgtttccagagacaggaagtagagtagaaaaacccgcttaacgttctatggttctaacaagatgtgaggatttatttgcatcatctgccttggggaagccttatgttctgcagttgctgtggaccaccccccagatgactgtctgcacagctgagggcagaataatgaagcatccaaattagacctttaaaaaaaaaatctttttttttttttttttttttgagatggagtttcactcttgttgcccaggctggagtgcaagggcatcatctcagctcactgcaacctccacctcccgggctcaagtgattcttctgcctcagcctccctaatagctgggattacaggcacacaccaccatgcccagctaattttctgtttttagtagagacagggtttctccatgttggtcagcctggtctcgaactccctcacctctggtgatccgcccgccttggcctcccaaagtgctgggagtacaggtatgagccgtcgcacccagcccaatcttttttcttttttttttttttttggtgcatttaaatgaccattcttgccaaaagttactactcagaaaattaaactaaaatctgcagggcttatttcactacagccagttccagtcagtggagcatagtggatgagagcgtatgtgagcccaggttcaaatgctggctccacaactcactcattagccacccgacttggggaaaacacggaactttgctaagactgagtttccttgcctataaaggggtgctaatcaaagttcccacctcacgggattgttgtaaagtatgaagcatttagcacgatgcctggcatatagatggtactcaaaatatgttaccttaaaacacacacacgtacaagcacatgcacacacacatgcacatacacatccatgtggtttgctttcctaaaacccatcctatttcactatttggatgtgcctagattcatgtggtttcccagcatgtcattgcagcagccctaagtttagcagttaactcatctagcaaagatggtgcttttcacaagcatgggacaaagacttcttttgtccctgcgtgagaaagcacttagtgcactggaatgtaaagattgcgcaaatgaactctggtcacagctgaaactctcatggtaataaaaataccttcaggccttttggagttagtagaaaaatactgtagtttttagacagaaacgtctggagggctaagatttagattccgacattccagtttgatcaaaagcagctgacattatcatcattgcaactatttataaaatgctcgttgtgggcagatactgcaccaggcacttcaggaacattcatcttagatgaacttcaaagtaacctctgatgtagtgttctgtcatccccaggtcttggatgatacaagtcaggattagtatgcctgaggtcttttggccttggatcaaactgggatttgaacacacctctgtccacccctaggcctgtgttcttaggcaccataatgttgtagcactcacctgtgaggaatggatttttttcattgccttggatttttttcattgccttgaattattttcagatatgaaaaacattgttcatctgtggtcttactgacttctgttaagtctcatatttgtggtctagctttagattctccatctccttttttttcccccagacttaatgttcagtgagtttcacttaggtccactttttatttattttatttttattcatttatttttttgagatggagtttcgctgtgtcacccaggctggagtgcagtggtgtgatcttggctcactgcaacctctgcctcctgggttcaagcagttctctgcctcagcctcccgagtagctgggattacaggtgtgcgccaccacacctggttaatttttgtatttttagtagagacggggtttcaccatcttgggcaggctggtcttgaactcctgacctcgtgatccacccgctttggcctcccaaagtgctgggattatagccgtgagccaccgcgcctggcctatttatttatttacttatttatatatatattgtaagacagagtcttgctgtgtcaccaggctggagtgcagtggcacaatctcggctcactgcaacctctgcttcctgggttcaagctattctcatgcctcagcctcccaagtagttgggactataggcgtgtgccaccatgcctggctaatttttgtatttttagtagagacggggttttgccatcttggccaggctgctctcgaactcctggcctcaagtgatccgctgacctcagcctcccaaagtgctgggattacaggtatgagacaccgcacccagcctacttatttttgatgcttagtgattttagagagtaagtaggttttgcaagtccattggtcctttaaaataatttctagattgttggcattattaaaaccctaaatccttttaggaactattgcgaagaaagaatatgatattcgtaagagctcagtgctaatattagcattggttatggtagtgaaagaccagataaatcttttagttgggaagtatgtcttgaggtatacttccttataatcattaagtaaataagtaaaactatattacatagataatgtgtaactctctgtattacatagaatgtctgcagaatgtagataggaaaaataaagtttgtcaataattttcaacatctttattgagatacagttaatctgccatacgatttgcctatataaagtgtacatttcagtgtgtttagtagtgtatttgcagagttgtgcagtcatcaccacagtaacttccctaacactcattttaacatccattcaccttaaatgtgtcagttgcatcaagaaatagaaatgggatggtatatgctatgtgatcacaaccacaaccattttttttttctttttgaggcggagtctcactctgttgcccaggctggggtgcagtggcatgatcttgactcactgcaacctctgcctcctggcagaaccctcctgggttcaagcaattctcctgtttcagcctcttgagtagctgggaccacaggcatgcaccaccacacctggctaatttttgtatttttagtagagacagggtttaaccatgttggccaggctcgtctcgcactcctgacctcatgtgatccacctgtcttggcctccgaaagtgctgggattacaggtgtgaaatcataggcctggcctatgatttcttttaatcaaaaaagaaaaaataaaaggcattagcaatggaaacagacgtacgtcacttcatggtccttcctttactgcactgtgtagatattatggtttttacaaattgaagatttgtggcaatgctattcactttgtctctgtgccagcattttttagaaataaaagtattttttaaatttagttatgtgttttttagacataatgctattacacacttaatataatataatcacacttttatatgcattgggaaaccaaattgtgtgacttgcattattgctatatttgctttattgtgatggtctggaaccgaaccagtagtatctccgaggtatgcctgtatatggaattgtgggcaattgctccttttcctttcttgggctttcagtatattctgtatttctgtattttgcaaattttctatgatgacttgtattactttcatagtggaaggcagtaaacttaattaaaaacaaaaatgaagtcattagttggaaaggataacaacccttttgttccttcctccttctccttgatattattagatactggataactaaaaccacttaaaaatgagctaattaagatcttaccttctttttttagaatgccttttgccttaagtgtaattaagaagcttacaccacaccttggccccactcccacctctaacccttcatcgggaagagacaatactaagtagttggtgtttccttgacatcaaaggacacggtataaacctcaagtattgatagaaacaaaagccagaggaccatgtgacgatgactggccctctttctctcctagacgggggtagccgtgtgtacacacgtgtgtgtgagtgtgccgggacgctacccactccatgtaatgttccattgatttccctgtggtctgtgtgctctcaggaagaagagctgggagcaggccaccttggaggaggcttaatcagctgctgtcgagtacacggatggtgcacaggagcaggcctggagtgggatgatggcgaggagggtagagctggtcagagacctgtttgggggcactgcttgccatggccagggcatggctgcaggagtcacgaaggctgttctcacagacgaactgtcagtcacacctgctcttcttggtgtgagctaaagctcctcacttgcagccctctgttagaggagagaggctacttttcccagccagtctgcctcctggcaccctcgagagaatatattcctaattgctgtgctcaactgaatgaatatacctccaggtgtgcagacaaaaccaaaaatacctgtcctggctcactttccagtgcttgggaggcagctcttattcaccccttcccctaactcttgtcacccctctcctgtgagctgttatggcatctgtcgtcgtcgtcttctttttttttttttgagacagagttttgctcttgttgcccaggctggagtgcaatgcacaatgtcggctcactgcaacctcgcctcccgggttcaagcgattctcctacctcagcctcccgagtagctgggattacaggcatgtgccaccatgcccggctaatttttttttgcatttttagtagagatggtgtttctccatgttggtcaggctggtcttgagctcctgacctcaggtgatccgcctgcctcagcctcccaaagtgctgggattacgggtgtgagccactgcgcctggcctatggcatctgtcttctaagggacctccctgcttcagcctttacagagtatctttctagcctcgtctctggctctgttcacggccctctacagagcatgcctctgcctttgttctttgaggagcgtgtagcctccttcctccccacctcaaacatctgcgcagttcccatttacctctcagcctgggccagtgcacagcatcaacaagctttctctgagaaggcagaaccagctatttcttggtctgtgttctcatcatactctacatactcgtttattgtgcttatgagaaggggggagaagcacaatactgctaaaatcaaaataagtctgctttgtttctagtttgaagggatctcagtattttttgcctgtgctgcctaaaccaaatgcaggattgttttatgtatgctccgtcctgaggtagactatgcaacgacttaccttaatttatgtctggttagaaactgagtacagtcatgcaaaagtagtaatactgcttaattaacaagaggttgctgagacttaatctgtaggagtctcttggtttagattggccttgggttaaatatatacgatggcgtgtacaacacagctgtgaatggtttaccatatgggtccaaataactagaaaggagagtcagctaaattagaaaaggatgaatcgagactccagaaaatagactgtaattagcagcagcacaaccccagagttagtgtaagtgccaataaactggtacagctttggtctctctctggaaggggagggtaatgaattaccctattattattgccagttttgattttagcagtatttgtgttctccggaagggatgcaaaagtgggtgatttttctcccccctttctcagaagcgcaagtatagaagcataactgcacgaagttttgcacttatttttttcttatacttttaaaatagaactgcttaagatttctgtggccaaaagactaacatcccatgccactgcagaacaagccaggatggatatttttggtttcacctgcacgccaggtatattcatttggctgagcagaacaattagaaatatattctcttgagggcgccaagaggcagactggctgggaaaagtagcctctctcctctaacggagggctgcaagtgaggagctaaaccaacaagagcaggtctgagtgtgagctcttctgtgactcacgtagcccagggccttctcaccctcctggaagggaacgggagggaacggacccttcccagttgctgaggcctttctctctgtgttcaagtttactttagactgacttctcatcttacagcagtgctgggaacaaagaggccagtgctgagtcacagccaccctgtgactctgccagcacagattttctttgtagtgatatttgtctatgtatctatgtaggtgccagacctgagccacgtagctatcaaacactggaaaaggagtccttggtgcctttctaattgtaagcatcagctttcatcacctgcctctcttcagctctttctttttttaaaaaacagttagctcttttccctgaggaaatccaaataccagtttcacccagggacaatggcagtaaccagattctaatctggtgtcagcaatgccaagaaaattctccaatatcaagtgagttaagggtggctgcgttggtttctctcgcatctgttcacattttttaattttctgtcccatgaggctgacggagtagcagagcacaatacagggcttgcattttatgcatgttccttcactgacgatttgatttgaatcttgagcagtggtgtactttgtgttttcctgctggtcttgtagcttgtttcagaaatataattctgcatggaaggcagacaaggttctagattattaaagcagccggtgagattaccaagtcgatgataccttaaatcctttctaaggaactcagctgaagtgagatcaaagcagaatggaaatagaagaaatctgatttttggaccaaaaccacttcttaggcacttagctaaactacactttccccgagttgagactgtgtgccccagctgtgccaggcttgggagaggcacccaactcccctgcctcatttcaccctgtgcaatgcctactttctctcccatctcttggcagctgccagagtttgtcatgtaactggactactcatccatgtgtgccaatggcaaaaatgttctctatctttctttgccccatatttcacaggcagaaattcaaatgcaggcaggggccaggcttgtgacagagaagctgaatgaaggcagtagatgtgtttctagtcgttaactcagccagtcttttctgcatcctggtaaaataagtattatcattatctctgttctataggggtgagatacctaggcctaggaagagaactaatgtgccccaggatctcacaggtctgagtcccatggagtttccaaagcactatattgtggctgctacttatccagaggcctcccctggcatctgtcagcctgctgggtgtcctgtcttgatgagagacgctctggagacacagtgctcgcttgtgctggatgacccagaggggcaacttttacagcaggggttccgggccagccagcaccctggctgaaggtgcttttgggtagtcctatggctagaggggagcttttctctccctaaaaatctctctcactagatggatgactggctggcctaacaggcttgtttggaaggacttcctccctttgctgagttattcatgtctctcctcagaagagagtcttctagctctttctgctgaagaaaacctcaactgggttatccctttagtggccatgcattattaccaggtggcaaatcattatctacagattaccaaatgtaagtgcatttgtatgtaaaaatttcagcccagttctctacacgtgttgacacattattgtaccatatcctttgtaggagctagatggtggagtgtggtatgaaaaagtatcaaagtataattttaaaaaggtacaaacttgactcataggataaacatatactaaacttttaatgcactgaggtaaggctggttcagagggaatttgagatactggatgttggtaagtgttgagaaaagaatgttggaatgagattgttgggccaggctgggtgtggtggctcttgtctgtaatcccagcactttgggagggcctgggcaacaaagggagacctcatccctaaaaatatttttaataattagctgggtgttggtggtgagtgcctgtgcttccagctactcaggaggttgaggcaggaggatcatttgggcccaggaggtcgaggctacagtgagccatggttgtaccactgtactccagcctggtcaacagagtgagaccctgtttaaaaaaaaaaaaaaaaaaaaggaaagattgttgagctgaatacaagaccattaatgtcctatagggtagtgaagccacaacctttggggttatcttttctactggaccaaaatctacaagttaacatgtaaccccacagagtgtatgcccaaatcagtagtaagtagcacgtcaggtaagagcaggccccttgagcaggagtctttgggcctgtgagatagtgctccagcacatacctggaggatatgctgtcttcctcttgctttattttcaagttttgcataattttctatcacaggaggcagagttgcctagtgcagtgagccagggtctttagtcccggtttgaatctcagccctgcaagtgtcttgcttgtgtgaccttgagtgagtctctgccttctatgagcattggtttcctcattagtacaaccgggatgacaatggcacccacctcagatgggtgtggtgagaagtacgtgatagaatatgggcatctgataaaaatgcctgtaacatagtaggtactcagtaaaaggttactattattattattattattttgagatagagtttcgctcttgttgcccaggctggagtgcaatggctcaatcttggctcacctcaacctctgtctcccaggttcaagtgattctccagcctcagcctcccgagtagctgggattacacgcatgtgccaccaagcctggctaattttgtatttttagtagagatggggtttctccgtgttagtgaggctgatctcaaactcctgacctcgtggtccgcccaccttggcctcccaaagtgctgggattataggcgtgagccaccgcgcccggcaaaaggttactattattataataaatgaactacgtccacgtgtacacacccataactctgtggcattgtcctctctttgtggcatgcctctgaccttcttttagtaaagatgatttcttctcagctttgatactggtatgctcagtaatcttagtcaagtcaagtcgtggtcttccccataatctaggtaaggagaggatctggacagttttcctttgttttccaagtcaacccccactctcccgagaccttcatcaaacacaaatgaaatccattttctttgtgcagtcagtgtgtctcggcagatgtgagtcagcatcctgttcagaacggctgttggtgccttgccatggacaataaagacacacattttccatggaatgccaggcgcttgagctgacttggggtttccacccgcagagaggaggaggaaactccaggaggctgattttgtggttttggatccagccatcattttaaactgcaaatattctctgtgcttgaaaaatatggtgaatgatttatgggacccatgacccccaggtttctactggcaccttgctgtcagcaacacctccccgtggcattcccttggcaaagctattgcttcggactgactggcatttggaacagtgactgacctctgggggtgcccacgatccaggtgttgaaaatattgttgtagttagctaattagattagttggctattttcgttcaacgagtaaatgcttaaagatttccttgtgctgtttcttatcaggagccaaatacatttgtgtcttggttcctcaccaatgttggaaaactgtaacttctgttagttttgaaaaaaaattgtaaaaaatctgcctggatcacagaattcatgttctcacccatattctgtggggtcaccctatccacatcactcttctttggggagagcctttgcttagatgactttgtgatcactcatatcagacacacgaggaagaggatggaaaagaaagtgatattcaggttttctgtttcttctttatgccctcgccccacccacacagtttctttagaccctgtgcccttccgcccagcaaacacttccttaagcactggaacacgagaggtcagagagtataaatcaagggaggcagagccccatctcctgggcctctggcactatattcaatttagagcttttctggtgtcctggcactggttgtgcattgttgatgatgattgtgctgacataggtattcgaggttccgtccgagtccttcagttgcatcctgggtagaaatggtgagtaaccggatgacccttgcaacctcaacctgtactgaacaatttttcacaggaataaatggcctcaccaattacaatagcagggcaagaggaagcagcagtgttctaaagataagatggttcaatcccatttgcagatgcatgtatttggtattacaatataggacatgacttaagtggctttgactaggcagttgatcctggctccatgattttttcctctttccagttcaatttgaaacatgcagacagtggtatgggagaaatagctgatgcaggtgaggttcttgggcagggcggtaggaggggaatcttctgctggcagaaacagcctccatttcatttctttgtagttagtggcattagcacttgtgcaatgcattacggctgttcacttgtaaagtcccagcatgttagatactgcatctcagctggctgtttgcttggtaaataatttaggtaaaatacattttgattcctttagactatggttgttgctgcctcctaggtaagattcacgttaaccacccaggctctttatggggatctccgataattggattaaattctatcagtgctggctggacacttagctgctatggaaagaagggcaaaaagctgtgtcgttggctaagagtgtgggactgcattgcggcttgtggagtgaactctttagatgttacttcttacctgggttgtttggacaaaagtaagcacttcttttcctaaaattgtagtcgatcctgtacctcacaaaagcagttggtagaagtgacatagaagtcttttagataggtagatttctagagacatttccatttcccaccatggttatccatttctgttggtgattctcaaataaggaattactagggagtttgttgaagtgctgcttcctcggtcccaagttctacagagccttccttagtagttctcaggtgcagcctaagggactgtgtttttaataagtgcttcacgtgattttaatgcaggtggggccaagaaccacattctgacccaaacacagactttgcatttgtttttaagagagaatacttttttatgggtcactgttcttggtatgccttcaggccagcggcccctaggttgacttctggaagtattagaattgaggttagaggatagaattgtattttgtgatggttcttcagtattttcagttgtgggtaataaaattaagtacaaggcaaaacacgttaataaacaagtggttttcctaatagaaacctagagccatagaattttgagagacagagcaagggagcaaacgagcaagcgaacacgcatgtgtgggtaggcatgaatgcacagcagcccaggcacacgtccactttgtgggtattttagagtctttgaatcaatctcttctgcccgttcctaaatgaaacaaaatataagttaaagcttaattatatccattagtgttttgtggaagcagaagtggggggtcattgttcaagcccccttcttgtgcagatatagaagctgagaccccagtaggacaaatgtttacacacataacacatacagggatgggctgcagtccctctgagctttagagcctccacttatgaaatagaaagagaaatagctatcccctcttggttgttatgaggattaaataacatagcttgtcttacgatgtttggaaactgaagagaattatatagatgtaattcctaattaccatgcatactgtgttttctaactgaagtatttagagttatacagggactctcttgaagtgaagtcactagtcgattctggagcaatgactgcctgccactcaccgggtattaaaaaaaacccatttatggtcattatggtgaactttgaaagtacagataatcaaaagaaagattatacataatcccatcactcacatgatcactattaaaattttgatatagagacttctaggtattttcttatacgtgcatacacattttacaaaaatgagagtatacagagcatactgctttgcaacctttttttttttttacttaacagtacctttattgtggatattttccaacattaattaatacttccatgccatcattttaaatgactgcatagtatcccattacatggaaaaaagaacatttaatcagcctcttattggacacaggtgttttttctactttacttttcaatattgtatacaatgctgaaataagcatctttgaagctgaatctcatatccagcaattggatttatttttattttattttattttattttattttttttttttattgatcattcttgggtgtttctcgcagagggggatttggcagggtcataggacaatagtggagggaaggtcagcagataaacaagtgaacaaaggtctctggttttcctaggcagaggaccctgcggcctcccgcagtgtttgtgtccctgggtacttaagattagggagtggtgatgactcttaacgagcatgctgccttcaagcatctgtttaacaaagcacatcttgcaccgcccttaatccatttaaccctgagtggacgcagcacatgtttcagagagcacagggttggggataaggtcacagatcaacaggatcccaaggcagaagaatttttcttagtacagaacaaaatgaaaagtctcccatgtctacttctatccacacagacccggcaaccatccgatttctcaattttttccccacccttcccgcctttctattccacaaaactgccattgtcatcatggcccatccccaatgagccgctgggcacacctcccagacggggtcgtggccaggcagaggggctcctcacttcccagtaggggcggccgggcagaagcgcccctcacctcccggatggggcggctggccgggcgggggctgaccccccaccaccctcccggacggggcggctggccaggcagagcggctcctcacttcccagtaggggcggccgggcagaggcgcccctcacctcctggatagggcggctggccgggcggggggctgtcccccccacctccctcccggacggggcggctggccgggcagaggggtcctcacttcctagtaggggcggccgggcagaggcgcccctcacctcccggacggggcggccggccggaaggggggctgacccccccccccacctccctcccggacggggcggctggccgacccccccccgcctccctcccggaccgggcggctggccgggcagaggggctcctcactttccagtaggggcggccgggcagaggcgcccctcacctcccggacggggcggctggccgggcggggggctgatccccccacctccctcccggacggggcggctggccgggcggggggctgaccccccccacctccctcccggacggggcggctggccggacggggggctgaccccccctcccccctcccggacggggcggctggccgggcggggggctgacccccccacctccctcccggatggggcggctggccaggcggggggctgatcccccctcccccctcccggacggggcggctggccgggcggggggctgaccccccacctccctcccggactgggcggctggccgggcggggggctgacccccccacctccctcccggacggggcggctggccgggcagaggggtcctcacttcccagtaggggcggccgggcagaggcgcccctcacctcccggacggggcggccggccgggcggggggctgacccccccacctccctcccggacggggcggctggccgaccccccccccccccgcctccctcccggacggggcggctggccgggcagaggggctcctcacttcccagtaggggcggccgggcagaggagcccctcacctcccggacggggcggctggccgggcggggggctgaccccccccacctccctcccggacggggtggctgccgggcggagacgctcctcacttcccagacggggtggttgccggacggaggggctcctcacttctcagacggggcggttgccaggcagagggtttcctcacttctcagacggagcggccgggcagagacgctcctcatctcccagacagggtcgcggccgggcagaggcgctcctcacatcccagacagggcggtggggcagaggtgctccccacatctcagacgatgggcggccgcgcagagatgctcctcacttcctagatgggatggcggcggggaagaggcgctcctcactttccagactgggcagccaggcagaggggctcctcatatcccagacgatgggcggccaggcagagacgctcctcacttcccagacggggtggcggccgggcagaggctgcaatctgggctctttgggaggccaaggcaggcggctgggaggtggttgtagcgagccgagatcacgccactgcactccagcctgggcaccattgagcactgagtgaacgagactccatctgcaatcccagcacctcgggaggccgaggctggcggatcactcgcggttaggagctggagaccagcccggccaacacagcgaaaccccgtctccaccaaaaaaaaacgaaaaccagtcaggcgtggcggcgcgcgcctgcaatcgcaggcactcggcaggctgaggcaggagaatcaggcagggaggttgcagtgagccgagatggcagcagtaccgtccagctttggctcggcatcagagggagaccgtggagggagagggagggggagggggagggggagagggagagggagagggagactcagcagcaattggatttctatgtttaccttggctactctaaaaatgagagctaaagttatagatgctacagttaagatagcaagcatattggtatggacttgctttgaaatgagcatatacattttaaaaagttatttatttttatacccagaaattctaactttatactttttgatctaacacacttgagaattcaaaatacttcctctgtcaatctgctgtttgtctttgtctcaagcgttacagttttgacctttctgtttcttcaggactcctctgattttcttcaggccaagccatttgtagtttgcaagtgactttgtaggtttagcaactctactctctcacccaagagttacctatccagttatggcaaagactgtttctttcattaaacaaagttattaatcagtcaggagagagacttttcacattctgaatttacaaactgtgctttcttaagttaaatggcatgttaggagtatttctgatatgaaattggaaacttgcagacaccagaaggcattgcttatctttgtaaatacacatgttccaattaaaataggtactaaaatattttggtggcacctcaaaactcccaatttagatttaatttagattaaaacacttactctttttaataaagttataaaattaattattaaaattgcctattgaagattaaaggcagtggaacgtttattttccttacaaaacaattttgtcttcaataagtgtgattgtgttaatcaattatgctattaaaaatacaactgccgtgttaaatctgactcatttgtcatgacagtttttataattatagaaattatacctagctgcttatatagccataatcctgcaataagtataaataattatctctattaattcagtttgcagttactctctattaaatcccgagttaaatggcaatttggggaccttcatttaaaatcctactaaatctctgttgttccatctgactgccaaagccccacatatgcacctcctactgttgattccagaaaccaatttatgaataaaatagtttttaaaccacaagtatttaaaaggtccatttaagcttgaggtttgaggctctcaagaaaaaaggaaagagagtgtacacattgggtagaggatgctgacgaaagagatagaacaaatcttggtgtctgggtatttcagtttggaaaacagtatataaatttcagtttgaaaaagtctgcttgacaccttctatgtaagcccaaaatactagagtatactgagtaacgattaacaacttgtatttccataggtgtggatgaggtcaccattgtcaacattttgaccaaccgcagcaatgcacagagacaggatattgccttcgcctaccagagaaggaccaaaaaggtacaggcaattccagggatggagggcatttcttgttgaatttttgtttcctcagacattgctttttcttttcatgaattgtggctctcatgcgcaaaagacttgtgggacccttggatatctaagattttcttcttaaatccttgtaagagtcactgcacatgtgtgtgtgcgtgtgtgcacgcgcgcgtgcacctcaggtcatcaggcattaggttctcataaggagtgtacaacatagatccctcgcgtgtgcagttcacagtagggttcgcgcttctgtgagaatctcatgccaccgttgatctgagaggaggcagagcgcagatggtcacgctcgctttagagtgcttgggagctcctgtgtaaggacagtaccctcccccaacccaggctacctggagggagagcttctgggaatagaaagttaggaatagggaacaacaacaataacaacaacaggcaccatttattgagtgcttactttgggccaggcactgtgctcagttttgtacatgtagcaactcatttcatctttatgacttctgctggttcttgataagatgtttctaatttaattttaggatactagcctccactgagtgttgatcctaacaagctcctctcattttaaaaatatacacttgaattcttaagctttttgcaacgagtgggcttagttgttagttcatttggtctgcaaagctatcttcaacatgccatgctcctactatttaaagggtctttgtgtgctttttccctttgcttgtccactagtggttaagaaacaaccagtgcgtgttcgtcctttattttgtcagttgtaggaaattttatttttaaggacgtgctgctttatttttaacttcttgctattaaaagcttttgatttattcttggacagtgcagtaagtgtggcttcctgcagctcccgtttgacttatggctttcacttgtagccacagtggaggtgagctggaaggattctagaagagatatttctgcccttgggattgacatgaccagcagggtcctgggagttgcaggtcaagccttgctacacttccatcccccgcactctaaatggttggaaaggacataaataggaaagcatctggcttctttcatctcaagtgcattaaaattcttctttcactagaagtgtattaatcttgtgtagtgaggcatagaggggagtgttttatttctgcagcttcccaaaggggtctgtgagctggtagagccaagttcccagtggagcagaaggctcatctctggatagcaagcaaaaaatttgatctttcagctgtcacagagtatggtcttggaatacatttgggtgtgtacacacacacatagaagcctgaaactttttttttttttttttttttttttttttgtgacagggtcttgctctgtcacccaggcttgattgcagtggtgtgattcggcttactgcaacttctgccatgtggactcaaatgattcatctcagcctcccaaactgctgggattacagtcataagccaccacacccaaaacctagatcttggttttagattagatatatgtagaacaaagctcccacataccctctaggagggaagatattaccagaattatgatgaggtcccaagatctcacaggctttgctgtgtgctggggacagctcatcatcctactaattcttgactctcagccttaggccaaggagaattatgtatcttttataaaagatatgtaaactacttgagatagtttcaagtgaaacaatcggctgtttgtgaaataaagaagaaaatttgtgaaataaggaagatttgtgctgcagagttctttagggatacgggctgcagctgcccaggtgatgagcttgaagaacctaggcccggctggcagagtggagaggagctgggagagacagctgcttttacgactctttcatgttctagcagacgccagatgcgaggcttctccttacagggaagggttatgtttgatttatcatacatttctggagtttttgtttagtttttgttaaatgcaaagctctgtgctggacattgtgagaaacaggaagttgaacgcccataaggagtttagaatagaagtggaagaagtcagtaggtgcccaaatgctatttgaggtttgaatagagaatgggtagaggggagtgtcaagggtaggctaagtttggagttacctaacctcaaagttccaaactgggagactggtgttataattgggagctactgcttttacagtcccctcctaagtgccgtgtgttcccgggacattgggaagcaggagaaaatgggtggtgaaagccaggtggcttctaagatccatgtcagttctaacacttttgacatctacgaatgattcagcatggttgtctctgaagcatgctgcaaatcacctctcgtagcctgcaagtacctgtaggggctaagctttgtagatgccacaggtgctcttagaaagcaaggaaagaaagaagagagagaagaaaaaaaaaaaagcgaaaagaagaacattatttcagtaggaggcttcagtcatcagccatgatttgtaggaagtttagctcgaggaagcatcgctaaaagacacattgagttggggtgtctgtctacatacatgggtgctgaccagacctctgacaaatttttgtgttcatggtgacagtggatccaacccttaagaaattacatgcagcagggaattcaagggggccagttcgggggtgttagtttcctatcacttccattaaacaccgtccgagtttggtgtggacaaggagatattttctcagtattagatgaagtgttttgcataggaaagtttcatgacctcacttccaactgtgttgcggcctctggttccttctggtgactttgaggagctgccgctggaatggctgcccccacgtcttttacagtatatcgggaggccacaagatctgcttgccaggaggctgtctgctcaaacatctccttcttagcaggggccttgatctccgaaagcgtcctgccttccacggagtgttactgctttcaagcatattgcaaagtgcctgcactctcacagctttcttaggaatcacatacgactccagtttccttttattgaccggggaagacggcaaaattaacttggattttaaggaatttcgttgaagcaaagcctgatgtttatgtttctgagatgtgggtctgttgaagggaatgcagttgagggcgtttgacccaagactccggagtggtcaaagactcacaacctgcttcacaaaaagatccctcttacttttgttttactcactagttttaaagtaaaataaatattttccttatgattgcctgttatcttgaaggaacttgcatcagcactgaagtcagccttatctggccacctggagacggtgattttgggcctattgaagacacctgctcagtatgacgcttctgagctaaaagcttccatgaaggtaaatgcatgtgagatgtcatctctgtcaaatctgctattaattttgtgaattacagctttctgagtgtaatttggtgattttcagttttgttgaattctcatttggaaccattttttaaaaatgaactgaagttatatgtctcaggatttgtaccaaaaatatttcaattacttgttttaagactgtaaagaaatttcatgatgctgagaagtcagttaccagctgctactactcagcacctgggcaattggaataccatttgggaaaactacttccttgattacacttcctcctttaaaaagatatgttgtgatattaaggcaagaaaaaaaaactcatagcttttgttaagtgaagcttgcaaattctgcccatcctttcgtgggtgtttcttcctcccatactctctctgtcagtaccatttgtttcaaattcaggcagaatcagaacatcatagtgcatataaggggtaattctggatgaagaatcgtacctgaatcgtacctgtgagaaagtaactgtgaagtctcaatgcacgttatcttttatgtttttcttttgtaaagttcttttgaacctggaattttaggttaaattaagtaaaaactgtagattggaaacctcctgaactttgtgcatacttaaaatatcaagttttttgttttgttttgttttgttttttgagatggatttcgctcttgttgcccaggctggagtgcaatggcgcgatctcagttcactgcaacctctgcctcccgggttcaagagattctcctgcctcagcatcccgagtagctgggattacaggcatgcgccactacgcccagctaattttgtatttttagtagagacgggatttctccatgttggtcaggctggtctcaaactcccgacctcaggtgatctgcccaccttggcctcccaaagtgctaggattacaggcgtgagccaccgcgcctggccaacatcaagttttatataaatgcaatagatgcacacacattaatgtatgttgtactgcaacacatttggacccttttcttagtgtgggtctgcagcatttgaacagtccgacactgccctctgctgatatacatgggtaaagtctgcgctgtagatgagggaaaccattggtcttgattttttattccgagtctgttttctctgatgccactgttcctgaattatgaacagtctgagctgtaagcctgtcaccagagctaatgtcacagttcagttgtcatccttttcccagagaacacaagagtgagggtgcttcggacactgggcatctccaaagcctggaatttgatagctcagggctgctgtaagatttgttgttaagtctctttcttcctttagttcttcagcttagcccaagctgtgctcagtttattttagcggacttgtctgagtttcctaagtagactgtactgcagaaaagacgtcattaagaatgataaaatgtcgacaacatttcatgatcctggttgataaaaatagcgctcctgaaaaccgagtctgtggacctttggaggcagggatgagtcagcctctcctaggtttcttctgaccatcaacacttcagatcagtttgtcttattttcatcaagaatctatttagttgtgattcgagtggctttactggtatctattactaggtattagggacttgaaacagacctttttgagctgtcagtcactgttgtaatctatgtaattgggcccaatggaaggtgctttaactgctgaagctttgaccctgtgccagctcttccattagctatcacagttgaatacccgtccaaaatccataaagcttgaagtgacattaactgaactatgcttaaaaaaaaatctgttttgacttctggcagtaccggtggcagtatctgccatatgttacagtagaatttgcccttgtgataggaattgtggacagtctgtggagagtttgggccgggctttggaaattgccaaggtcacctttgaatgtagacataaaaacactattggaattctcagatattaccactggtatatcagtgatggaaggaaacacatcttacattattctgcctgtcttgcaattctacaatgtcaggatataacatttctcccactgtgtgttatttttagactatatttctatcatccttgagattgaacaactgcctctcaaaatattcaaagatactcggtagtcatttaataacatttgtgtagaatgctgtatggaccttttgctaacaaggggagaatttttggctttgctggaacctctacaaatcatgattaaaaactcagaaagaagagccattggctcaaaggttagatgaagaataaaattcaaaattaaccattaacctgaggcttagcttatattatacaaactactttttcggggcatataaacgctaataagtttaattaatagctgacacgcttttcatgtgggtaagtttcttattgtattaacaccttataattgatttacattttaaacagttgtaattctacttagttcaaagtgatagttccatattcggaaagacaagtattaaagaatcctgattattaaatcttgactttgatcatgaagccagctttgaaatacatgtttcattgagtcctttcaagctatctgacatgctcaaaagtgtatatattaaatttgaatacatcacccatcaaattcttattccttaataaagtgttggtgtctaggtttatttggcacttcattatttctttttgcttccctaaagtgcctgaagagtgcataattatcaagcaaaaatggaaggacaagaatgaaatttttaacattaacccaattttacatttcaaagagtgcagctaaaaattttttcttaactatacctttgcctggtaaaaagacttactctaacaatgctggctgcaagtgacaacataaaatttctgtattcctttattttagcgagaattgtttaacaaagaaatttctaatctgttaaaatagtgagtggttattgtagaaagtgaaaaataataataagaaaaagttactttatctacccacagcaaaaggcaattgccagttttagtattttggcatattctattgctgcctcttcctattcactacttttttttttttttgagatggggtcttactctgtcgtccaggctggagtgcagtggcgcgatctcggctcactgcaagctccacctcccaggttcacgccattctcctgcctcagcctcccagggtagctgggactacaggcgcccgctaccatgcccagctaattttttgtatttttagtagagatggggtttcactgtgttagccagaatggtcttgatctcttgacctcgtgatctgcctgccttggcctcccaaagtgctgggattacaggcgtgagccactgtgcccagcccctattcactacttaaaaaaaaaaaccatattaacagttgaactccaacatgccagttccaccatcttgtgctctggtgaagcattttttaaaggaatagaaaatgccattactttgtgctaaggggtaggagtatagattcttcagaaggaatgtagaaagcaggatgctaacagacccaatccatgtttgcaatttacttgatggagatcagagaagtaggctaatggtggggaagcatttccctgctgatgttcgtgcttcctggttcacaggggctgggaaccgacgaggactctctcattgagatcatctgctccagaaccaaccaggagctgcaggaaattaacagagtctacaaggaaagtgagtagcttgatttctgtgattcatcctctcagcccaatttatgtgactctatcatggccactggggttagggttcgggctaagatgcctgcattagtgatgtgcagaagtgcctgccaccttgactatgcaggcaaggttggctgtggtccaagtttctctccttcacctcctcattgcctgcattttgattattacattccactagaacttctgtgttagaagaagggtagacaggagggaaaggagagaaaacaaaacttgtttttaaacaagatcggatgaggagaagtagcaagtattatatatggattccacttattgggcgctgttcagtgtctgctcaagaggttgccaactctggactgtggataattgaagaattacagcaagagacccctgtggactggtgcacacttagcagtatagaaggctatgaggggaataaacaatgcaacttacatcgctactgcatttcttttttgttttactttttaaagttattatcatagttttacatattttgggggtacatgtgatattttggtacatgtattatatataatatgtaattatcaagtcagggtaattgagatatccatcacctcacacatttatctttttttttgtatcaggaacattacagttcttctctagctactgtatttcaatatagatgctattttgaatattgaaatatactttcattcaaaagcattgtttaattcttagtagtttttgccgctgtgcattttctcagtggacagtaaagcacaattgtgtgtgtgtgtgtgcgtgtgtagacctccaatttttttgatgttcagaacaagtactcacagtcaggagggctgggagccagtatttaaactacacgagaggtcaccaatcaacggtgagcctgaggatccctgatttgatctagccctgctgccccctgttatggataataactctggctctgatttcatgagggcgaaaatcattctagtgaatccttcctctgtttggggttaaggagaatggatatgtccagctgacgtagctgttctgcttctcagagtcttagtgggaaatggggagattggggtggatggttggctacacaggcagaaagcataaaaccagatgtattttcctccaagtgtacaagactgatctggagaaggacattatttcggacacatctggtgacttccgcaagctgatggttgccctggcaaaggttggtttcccagtttctttctttgcccttgcttcctcccaaggcaagtcacatacctcattttatacttggagtgaattaactaaatcccctgtgcctgcatcagaaattcagctgcatttttgaaagtgggtttgcactgtcactgcagagttgtcaattttgtataataggatttcttatcctgcaaaacctcatggacaagtggactttgggagccagagaagggatgggcggctctcaagtcctggcctggatttatgtgccagagccttggccgtgtgacttagggaaggtcactttgcctctatctgtggtcatgcaggacccagtgggaagtgaccttctggtttctttttcactgcgtttacttctcatggaagaatttgcccatatagtcctttgtctggggtggagttgtctttgtggagctgattgctaatattaacacattaacatggaggaaggggcatttcccctgtgaatccctagttctggccagcgtgtagcttaatacttatgtgccaggggagggacgagagaccctgggaaccctgatgacaaatgacagatagtgcgtccggcccactcacatctccattactgcaacaactcctatgccattctccctcgctctcctctcttcgctaccacctgccccatgtaccaccatccacggatctctgtgaaatacactttcaccattttactcctctgttcaaaccccatttctgctgcatcaaatttaaactcctaactgctgtgaaaggtcctctaaaccctccctgcatcttctttgctcatctttcccgctcagctctgctctgacagggcagctccttacttacctgagagcgtgctgtgccatcccttgtgtgccagctggctctcccgctctgcttggctagctgcatctgactgacccttgaagtttcagcttaagcccaggcccatcgttcacactctttgctgactctgccctctgagagttcttcctccgcccgcattttgtgtctttctagtgctgtgggttcccgggctgctttacatttgtttccacatattcctccatctgcattgcaagctctctgtgagaaagagctaaatctcatcagctttttgtgggggatggggacagggattctgtaaggtgtgtaggccaggactgggtatcaagggggggattgttgatggcaaggcacagcccccacttccttgctcaatgattttaccactccttggctggtctaggtttctttttctttttcttttctttctttcttttttttttttttttttgagacagagtctcactctgtcaccagggttggagtgcagtggcgtgatctcagatcacagcaacctggttcaagcgattctcctgcctcagcctcccgagtagctgggactacaggcatgtgccaccacgcctggctaatttagtagagacagggtttcaccttgttagccaggttggtctccatctcctgacctcgtgatctgcccgccttggcttcccaaagtcctaggattacaggcgtgagccaccgtgcccggccccatctatgtttcaaagtaagaaaaatcttacgtggttacttatttaggaaattaaataatggcgtacatggactggggagaaaacattttcagttttaaaatacacaaagaaatgtatttgaagttctttttctttcccccatagggtagaagagcagaggatggctctgtcattgattatgaactgattgaccaagatgctcgggtaagtgctgagctttttgctttgagtttttgttttctggtaagtctctggatagtctatatagtaatttaactctgtgtgacaaatgactcccaaactctgtggcttaaaacaacaaacatgtattatttctcagtttctgtgtgtcaggaattgaggagtagattagcccaattgttctggctcagggtcttttctgaggttgcagacaaaatgttgcatggctgcagtcacctgagggcttgactgggtcaagggaatctgcttccaagatggtgcacttcacatgactgttggtaggagaccttagaatcgctccacatatgcctctccatggggttgtttgagcgtcctcacaacatggcagccggctttccccagagcaagcaatctgcaaagaggaagccacagtgtcttttatgacctaacctcaggagtcccaccttgcactgctgtcatactcttttcattaaaagtgagtcactgagtctagcccacactcagtgggaggggattaggctcttcctttggaagggaggaacctcaaagaatttctggccgtattttaaacccaccatagtctgacagcaatgtttattagaagacattctcttataatgctggtgttacttacagaatcaatacgtgactcacatatgctcactcaggctttgcttgtatggaagcatcagtttctgcagagtgtaatgtggctgtgcataccaatcaggcaggcaggtgggaagcagaagaaggtggaggagacacagccagggacaggatggtgtactgctctgttgtggtgggggagaaagggaggccagcagagacctgtccttttctggctgaataagacttttgccagttctagttccattatctctgagaactatttgttaagcttattcagactgcaatgaactatattctttactcagagggacaacgattatctcaaagtaagtcataaaagctgcagaaaaaaattaatttaaattaatgttagttttaaaattcaatatattccacacggcacttctagcaggtagtagagaagggttttaaataaagtaatagaagttgggttttgcagttcctagatggtggaagatcacggaatgaatatctacccttgcataagcctttcttcctcttgccctccctgccattgttagggctacttgtagcccctaaattttccagaaactgaaagtgagatgagatgggctccttttccagctccatcactccctgagtctctgagaagcttgagaatgagagcctggtctgtagctgtccagtaaacatctgctagcttatctgcccctaaatgtgcccaaagggaggagggccagatgtgttaatgaacatttacttgttcttctttatatgaatacaagctcttggtccctcctttcttattcaaggaaggagattgtacagcagacctcacgaactatctgcagtctcatatggtatccatctgtgcctaaggaagactgcttgtgattaagacttttgacctaaatagtaggtctctgcccatgtctgcagtataatcatctttcctcgtttggcattttgaatgtgtagctttttttgttttttttgcatgacattttttttgacgttacattggatgtgtagttaacttttcctggttggttgtactcgtaggatctctatgacgctggagtgaagaggaaaggaactgatgttcccaagtggatcagcatcatgaccgagcggagcgtgccccacctccagaaaggtgggcactgtgctgagggagtctcagtgccttggggccctggctggggcggctgggtggatgtccatgttgggatggagtctgccagaatgaggttctgtctccgcttggcactctcataggctcacccattttccctcacctttctctcccattctggattcttttctcttgcaaatagtttctgcatttggtgctttattctgcagctccttcttgtttgatgatcatttggtcttgccattatttgttgaagtagtggactttggtgcatgctctgtactgtttcctatggttttcggatggaatgggttccactcaggggagatagagatggtccaaatatgtggcctgggcagtgccattcaggacaggtggtatggctgttccacgacaaacttggccaatgttggctctggtcaccgtggtaacctctaagctcctaggatgctgtgatcatcctcaatttttaaaaaaattatggtgcataaaactaggtgggtgatcgttgacagctttgactagtggctcggatctgataactctttgttgtttttcctcagtatttgataggtacaagagttacagcccttatgacatgttggaaagcatcaggaaagaggttaaaggagacctggaaaatgctttcctgaacctgggtaagtgaatgtggcccccattcctggtagacatcagctaccagagcagaagtgacagatggccatcctgttaatccaaatgtgtttgggaggtgtggcttctatgcatgctttggatagttttacagtcttaattgtatagatttcagaatataaaactgaagaaaggcctaacttggtaacagattgttgccagggaggagtaagagaacaggaggagagaggggtgtgttgtggaaactcacgtatgcacttgggttctgcaggcctcagagacccctggtttaaaaccgtggtggaacttagtattgcagaggatttctagatttcccttagcctgtcctattttgcagcccttttccattgcattaggtcacttctggtttgtggcccagggccagggcatcctctctcattggtagaggagagaccagagcagctgcagcgctgactccctttcttctctccacagttcagtgcattcagaacaagcccctgtattttgctgatcggctgtatgactccatgaaggtaagggcagctggctgagagagctgtgtttccacactcagcttttcttcttttgggtcccaaattgagtctccttgattcatggatggaggaaggggaccccactgtgtggatgcaggaacacactagtcagctgtggttgtatgtgacagctgagagaaccacaaatctgtcttctttctctcagctgcttgaacatgtatttgcgtacagacaaaaagtaaagtgccatgggagagagaaaatgcgacatggtagtcgtgtctgatccctgcttaggtttctccgtgatttcttcctgttactgccagagtcaagacaagcgaggaagggagcgattattaagcacccactatacagtggacaagtgctactattttaccttaaatcattgcataacaacctctgaggcttatgattatcttctttataaatgcagagatggagctcagaatacctcagcctgcttgaagttacacagacagatttgaacctgggtctatcagaccccaaagacagccccacaacccttccctaaacgaaccacctcttcccgtagacccatcccattttctacacctcaagtgtgccatgtgttttctggcttctaggcttttgcattttccttctggaacatctcccttgtctgtgctgcctctgccatctgtctttgagttccatatcaaatagcaccccttggtgccttcgctctgatgctctggaagtaaactcagtggtctttattgcacatatcattagaaatggcacagagcgatgatagaaatgtgttggcatgttccctctaagcctgcaagagtcaggaacctcttgttacatatggagactcagactgcttgaactgagccttgcagtagtaggtgctcagtatatatttattgaatggtggcatagagtgggagtctgtgctgactacagcctggtgtgtttggaattcccagatgctcttctttcttttcttttcttgtcttgtctttttttttctttcttttttcctccctccctccctgccttcccctgcctccctgccttcccctccctccctgccttcccctccctccctgccttcccctccctccctgccttcccctccctccctgccttcccctgcctccctgccttcccctccctccctgccttcccctgcctccctgccttcccctccctccctgccttcccctgcctccctgccttcccctccctccctgccttcccctgcctccctgccttcccctgcctccctgccttcccctgcctccctgccttcccctgcctccctgccttctcctgcctccttgccttcccctgcctccctgccttcacctccctccctttccttcccctccctccctttccttcctttccctttccctttcttctctctttctctctccttccttccttccctttttctttctttctctctttctttctctctctctctctgtctttccctctctctctctgtctttcctttcttataggtttttgggaaacaagtagtgttcggttacatgaataagttctttcgtggtgatttttgagattttggtgtacttatcacccaggcagtgtacactgtgccctaatatcccttatccaaaatgcttgggaccaggaatgttttatatctcagatttatttttgattttgtaatatttgcatatatatgatgaaatattttagggatgggacccaagtctaaacttgagattcatttatgttttatatagaccttacacacatagcctaaaggtaattttatacaacgcttttgataattttgtgcatgaaacagtttgtgttaagtgctgtatgtggaatttttcattgtggcatcatgtcggcactgaaaaagttttggattttggagcattttagatttcagattttcagatcagggatgctcaacctgtagacgctttctttaacgataacattctcagcgaatgtaacaaatatcaacttgattttcagggcaaggggacgcgagataaggtcctgatcagaatcatggtctcccgcagtgaagtggacatgttgaaaattaggtctgaattcaagagaaagtacggcaagtccctgtactattatatccaggtaagcccgaggtgcagtgtcagcctgccctgccgtccagagcaccccgggccctggcaggtggcctggcagaatgatgacagagtggcgattttctgttttctgactctctggggaagagatgctagtcatcaactatcagggatttattttgaaagcaccatttgtgatttgtcctggactttgtacaatcaggcagatgttttatatttttcacatctgttactctacaatgatcatcggtgttcatgacgatgatcctgcaaggcttgctgacatcccgaagaggcttggaagatcagttacattttacttttttttttttttttgagacggagtcttgctctctcgcccaggctggagtgcagtggccacaatctcggctcactgcaacctccgacttctgggttcacaccattttcctgcctcagcctcccaagtagctaggactacaggcgcccgccaccacacccggctaatttttttgtatttttagtagagacagggtttcaccgtgttagccaggatggtctcgatctcctgacctcgtgatccgcccgcctcggcctcccaaagtgctgggatgacaggcgtgagccactgcgcccggccacattttacttttattatgcattggttccttgaaaaatcctctgggataggcctaacaactttcagttattcagaactcccatctctccaatcagtttagcatctgtctgttttgatgtgatgtcgcatttgcagtaaggaagtgatggcattcacagtggtaccactgtgtagatttcagacagcccttgcaattcccctttctagaagttcctcagatgtccaaaggcatgcccatggttagcaaggataaagttagagctggattttttgtagccaggtttattagggcacatgtttaaagtcaaaggaccagttagactcttagtaattgttcctcacctcaccagcttatttccacttgaccttaataatgcaggaaataggagagtgagctaggaaagtaccctgttttctgtggaaagacgaggacgagagaggaaagttagggtgtttgtaggaccttgctgcagtaagaacagccctggtcactaacctatgtcaatcctcagcaccttgcactccctccaccccacagtcctaaggagccttgagtgtcttccccagcacctcctccgaccacactcctggaggcttccctggcaatggtttgggtgtggccttccaggcctttgtatcagggcaggtctcctgcagagtcttctctttgtcatgggagaagcttcattgtgcgttgaggctacttctgtgttattgaggagtctgggcttttttctgataccacgtttcttttctttcctgggccattgtagcaagacactaagggcgactaccagaaagcgctgctgtacctgtgtggtggagatgactgaagcccgacacggcctgagcgtccagaaatggtgctcaccatgcttccagctaacaggtctagaaaaccagcttgcgaataacagtccccgtggccatccctgtgagggtgacgttagcattacccccaacctcattttagttgcctaagcattgcctggccttcctgtctagtctctcctgtaagccaaagaaatgaacattccaaggagttggaagtgaagtctatgatgtgaaacactttgcctcctgtgtactgtgtcataaacagatgaataaactgaatttgtactttagaaacacgtactttgtggccctgctttcaactgaattgtttgaaaattaaacgtgcttggggttcagctggtgaggctgtccctgtaggaagaaagctctgggactgagctgtacagtatggttgcccctatccaagtgtcgctatttaagttaaatttaaatgaaataaaataaaataaaatca

SEQ ID NO: 62 - DNA, 58678 bp, Homo sapiens
  source 1..58678: mol_type = genomic DNA
agcgcggagcacctgcgcccgcggctgacaccttcgctcgcagtttgttcgcagtttactcgcacaccagtttcccccaccgcgctttgggtaagttcagcctcccggcgcgtccccgcgagcctcgcccacagccgcctgctgacgggtggcttggggaggtcgcggcgcctcgcccagttcccccgcgagtgcagctcgaccctgggcagggctggcggctggcgcccgcgcccggccccaacccagctgcgtgggtggggagctggagggacctcagtcctgcatttcagagtcgaggagactgggcccacgggggggaaagtgccgtgccatgggtgggtcacccaggtcttggtggggcccaagctgatactcagctgtcctcgctccctgaaagcttcgcttattacagctagcagcgtaagggatccacttagccatctcggcctccccagtcctaaaggtctaggggacagaaaaaagctgggagtcggaaggttcctcgggtccccggcatggcagacggggctggctcagaggtctgctctgtggacttggaatcgcacccatcctgtgagcatcttctccccctcacataggcaatttattttattttacttattttttttagaaggtagaaaacagtggatttgcatattgagggttggaagttcaagaagtttgctttttcctgaaaagactaaccgttttctttgcaacagaatcctattgactagatatgaatcattcccttggtatttgagtcaccaggtggaagatttggatacttgattgcagatgaccatatataggaaagtatgcaggtgctgggaggttctgggtcgctggaggcccctctggctactgatacgaaattgcatagcccaggccgaattctttccaaggatttgtgttcagcactgacagcaagaccctgccctccgggaaagatacatttactatgttcaccaacatcattttttaaaatgtaactaattaaaacgttactccatgaagataccacctttggttttcacgaagacggaaaacttcagactgaccagaaagggaatttttaaatgtaaagaaaaccagaatcttgttcccagaactctgtggttgtgtagagaaacctgtttagaaataaccgtagaggaggaagtaaaaggaaatgatgtaatccctttcaggaaaggatatattgaaattctgtttaagtcatttggccttcgctgtggagtaattctttacatcttaaaagttaaatgatagattagtaataattcttaataattttccagttctgctggatcaatgcatattaagtgtcagatttggtcaggtgtgggccaggcagcagattaaggcagaagcatgggggttaggttcatacctttagagtctagctgcctagatgcagtaggggtccactcactagctgtgtgactgtgggacattaccatacctctctgggctccagcttcttcatatgcaaaacgaagatgtaatacctaactcactggatgattgtgcggcttgtattaaatcattcatttaatcaataagttttttttttaaatatctaccgtgcaccagtgcacacagataagaagaatctccagccctgtgaaactgacctcgttcaatgctggcaacacccccttcttcactttttacagatgaggaaattgaggcccaaagaaattgtgtttagctttaagaggcaaaatgagaaccaataatgccttgttttcactgtacagatggtttgacttctgatttttagacttcagaatagtttatctggctgtaacccctcataagtcaaagagcatgtatttagagagatgcagtattagactctaactggagagttgactgccctaggctacagagagcctgaaaaaaccaaggtgaaatatttccagagactaatagtgtaatttcccattgaacttttctctgggggtgtcagggaatttttagaatattttgttcccaggaagggtgggagcaacttgcatttctaaatcaaccctggagatatgccagcatgtttgaataatatctatttaagaaaaatgtgtctggcttcccaatcaaagaactgtgcctttcacctctgcaccccaccaaggactggaccacctcctcaaagagcagatgtgtctttataacagactgtaggcttggagccttgtaaaatgtacatggagtttcacaatcaagcacaaggaatccaactgaaggcagctaaactttgtgttgatttggtgaggaggagtaaaatcctgtgtttttgttgttattgatccccgtagtggtagcctgtcagtaatcagcagagttctcctggactttaaataagtcaaaaattggcttttcaggaagtatatttgtaagcatcttaagtacaaagatttttttctgtctcttgtcttgaagtcctcacaggtctagcacagtcccttgcatatggtagatgctcagtaaatgtttgtttagcaaatgggatacccaatgtcagatatatgctcttcctgagaaggtttttctgtgaatgttgacatctgttttctggattcaagattaagggttggactaagattattgtgttctgaatcacatattgataccatttactaattgttttcttttaatagattagtgtgatctcagctcaaggcaaaggtgggatatcatggcatctatctgggtaagtaaaaattaagccttcacaacacagtaacatatatgagtcaaaccaaaacacagaaggtcaagatagcaaggaaaattttaggaaagtttttaagtttatctggcaaaattaacatgctagaaaagccagaggatgtcaaaaataataaaatatttttaaaaatgcattgtaaagttacatagttaaaataacttatgatgacaccaaggcggaaaggtcaaaatcagataataaatttagtatataatttgggaatttattatatgaaaaagatgacatatcagagaagaagagacggattattcaataaatgttaggaaaacttctagctgtttggggaaaaagtaaatctgtattcctttttctccttacaataaaataacttccatgtggataaaatacagaaatgaagaagatgaaatatgaatgggccgggtgtggtggctcacacctgtaatcctagcactttgggaggccgaggtgggtggatcacctaaagccaggagtttgagaccagcctggccaacatggtgaaaccgtgtctctactagaaatacaaaaatagcccggtgcgatggcagatgcctgtaatcccagctactcaggaggctgaggcaggagaatcgcctgaacctgggaggcagaggttgcagtgagctgagatcatgccactgcactccagcctgagagacagagtgagactccgtctcaaaaaaatagaaaaagagaaagaaatatgaatggattgaagaatattcttggagtggggaagatgcttacaactgtgacacaaaaccaaacgcctaaaagaaaaatattgatctattttaactacatacaagtttatcactatgacagccaacaatcccattggtagaggcagaagacagctcgcagggaaaaaatatttgcagcacattagacaaaagacttatttccttaacatacaaataacttgaataaattggtttaaaaaatgaacttgacagaaaaagttgtaagggacataaacaggacataaaaagaattataaatgtccaataacatcagaaggtgctacaaggttggacacagtggctcacacctataatcccagcattttgggaggccaagatgggaggatcatttgagcccagaagttcgagaccagcatgggtaatatggcaagacccagtctcttaaaaaaaaaaaaaaaaaactttaaaaattagctgaacgttgtggggtgtacccatggtcctagatacttgggaggctcaggtggtaagatcgcttaagcccaagaggtggaggctgcagtgagccatgttcataccactgtactccagcttgggtgacagagtgaaaccctatctattaaaaaaaaaaaactcctgcatctcagaattgaaaaaaacataaatatcatgatgagaaacacttttctacttaagagattggtgaaggttaaaaaaaaaaagtaatgtagaggatgtggcaaggtgatatttttattctctgttcatgggagagtaaatttggtacacttttggatagtattttggcaatatctctcagtccttaaatgcacatgtcctttaaacccagtaattccacttgtgggtatgtatcttatagataaacttgcataaggttgaaaaaataggggcccaagtacatttgtttgtattaatgaaaacaaacatgcagacagcataaatgtccatcgatagggtaggaataagtaaattactcatttataacttacaggcatttttatgtgatcattaaaatgaatgggaaaaaagtggatcagctgtatgtgaattgacattaaaaaagtcccaagatgtaataatttaaaaaatcaacttatagagtaatatgtacagagggattctgtttaaaagaaagaacaaagaaaataaaaaatttacggaaagactattacatcaaaactttgtggaaaggtggaattgtgagaaaggaattttacttttcaatatatcaccttctgtactgtttgatttttttttttaatcatgagcatacattatattttataagtaaggtggagggcaagtttaaagaaaagcctgtgcagagatgtgaccatcccttggcctggcgtatggatggaaggtgtgctgttggaaggctttgtttggcccaagttactcccttctcactggctaggaggctaaactctcatctttcatctgaaatccctgctgcttttatgaacatatcatagaatcagatgaaaaaagcatctctccaaaatgctggtgttaaaaaaaaaagtcgccctctggccctcgcccatgagtaaattaacatggaattatttgggcaggctctcctgctgacaccttcaaaggcgtggcacatttctgaagggctaggagagacccaagtgcgtgtgatcaagggtgtattcatttcctattgcactatgacaaattatcataaatttagcaatttaaaacaacatccatttattatctcacagttctatatgttagaagcctgaaatgggtcacacagcactaaaatgaaggtgttgttgggactgcattcctttctggagactttgggaagaatcctcttccaagcccttttaggttgttggtagaatttagttccttgtagttgtcgaattgagttcttagtgcttgctggctgccagcagaagctgtctttggctcctggaggtctctgcctgtccttgtatgtggcccctgcatctcagaaccagcaatgatgcatcaaatcttacttatgcttggaatctctttggcttttctttctgggggatctcttttctgccattctcttctccctccagctgaagacatttctctgcttttaagggtgcgtgtgattaaattgggcccacctggataacacgggctaatccctgtgttttaaggtctggaaccttaattatgtttgcaaagtctctttcatcatgaaacacaatacattgacaattcccaaggattatgatgtatacattttaggaggctgttgttctgcctaccacaggggctaggagtatggctacatcagggatggtagcatttggcatcagatagcaggaaagaggtggggaggggccaaaaacaggaggctaacctgagcctggagggcaaacccacacgtggagaaagaggccctagccaaagaagggctcctactgtctctgggtttttctttttttttttttttttttcctgtttacctcctctccctcaattaaagaactaatacttatgagtggctcagagagcaaacattaggaacaactcagaactgctatggaaaacaagatagcaattctccaaaaaattaaaactagaactaccacatgctccagcaatcccatttctgggtatatatccaaaggaaatgaaagcaggatcttaaagaaaggtatctatacacccatgttcactgcagtactttttacaatagccaagaggtagaagcagcccagtttccattgacagaagaatgaataaacaaaatgcggtacacacacacaatggaatattattcagtcttttaaaaacacatgttgtgtgagaggaagaaaaccctgtcacatgctactatgtgggtgagccttgagcccagtatgttaagtgaaaaagccagtcccaaagagacaaaatactgtatgatttcattgataagaggtatccaaagcagtcaaattcataggaacagaaggagactggtcgttaggaatgaataaggaaagagaaaaagaggagttgtttaatgtgtagagtttcagtattgaaagatgaaaaagttctgaagatgtttcaaaacaatgtgaatattctaaccactactgaactatacacttagaaatggttaagatggtaaaaaccctcagatttccaattgtaaacattcttatcacaaagttttatgtgttctttttttctctctgccacacaaaaccacatacacactcaaacataaataagcaatcaagtcattgcatttctacaaaactgtatacgtgattatgtgtatgattagtttattacagtggtatgatcaagggagaagtcattagttgcaatttcaatgcattaccattgaagatgaaagaatggctggtttcttaggtcttttatattctatctaggagtgttgcaaccctaccattgtttcagatgaatcaacaatctatgttgcattagtatttcctttgtttgcaaattttgaatatctctgctcagacatatgttctaccacttcacccttgatgaaagggcctgatatcttattggtttgtactccttggacttagagtcccttgtcatatgttgcctgtaggtccacagcaagcactcaggaagcccacaaattagaatgtcttagaacgtgactttttattaagctaccacagcagtattttttctgcgtaccttctgttatacaatgctggctttcttaggtaaatactctgagctctttcctccttgatcaattcctaacttacatttacagaataataataaatgtaattcctattagtttgaactctcaaattagaatttttattatggtactagaatttttctttctttatttctttatttttttttgacagagcttcactgtcattcaggctggagtgcagtggtgcaatcacggcttgctgcagcctcaacctcctgggctcaagcgatcctactgcctcagtctcctgagtaggtgggaccacaggcatgcccccaccatgcccagctaatttttaaaatttttttatagagatgggaattcactgtgttgcccaggctggtcttgaactcctgagctcagctgatccacccacattggccttcggaagtgttgggattacaggtgtgagccaccacacccagtggtgctaaaatttttttaaattaactcacaatcattgtaatcaccatgaactgttagtaacatcctaacttgggatacattctcctttcaccactccaaactctaatttacaaaatgaggaaagggaatatagagctactctgcaaccaagggataagagaagttttataaaaatatattacctaaatacaatgcctactaactttgttttgaagttcatccaaaacagttaaacaattaaagcagcaagtacctagtgcgacaggctctgctgggagcagaatgaagacagtctaaccaaaattgtaactctccctttcagaactccctaatcatttaaaaggtaggctcttgagcaaattgcttagtctttctctacttcagtttcctcatctataaaacaggtagggtaatagtgcttatctcatctacggtttgtaagcattaagccagttcatgtaaaatgtattagcagtgcctggcatggagtgagcactcaataaatgttagttttaatcagcatgatttcaatatattaattttattctaaaatgtatttcttgccaaataatatcgctgcaactgtttttgtagaggggcttctgcctatttcctgggcctgattttattacacatcaatagccccctctccccattggaatggttctttcagccatctaaaagagatgtcatgtcctcaatcagattccttctgaccactcttgttttcaatattttataatattttaaacacatatatatttctaaagacataaaatactccctttccactcctagtgggcatactggaatacagttctgacactaactacccagcattagcatcagattccacaggattaagggttcagtcctctgcaaaactgccctcacttcagatgtcagttcaagtgtcgggaatcacctgcacttctggccaactggctataaatttaggagttttcatgaccctctgaaattaaagaattccctagaatgattcacagaactcactgaaagtgctatccttatgaatgcaagtttattatgagggatacccatgggcaagctctggaagggtcctggacccagagcctccatgccctctccctgtggcatcagggcacctcaccctcctttgtgtcagtgtgttcaataaccaggaagctcctctgagcctcagtgtccagaattgtaattggagttccattatgtagacacgaatgattgattaaattatttgttacatgattgaactcaatatccagcccctctttcctcctcagaggtctggctgaccagagttgcaaccctgtgatcacagggctaatctttctggagaccagccatcattctaaggctatctaagggtctaccatgagtcaccccaattgcatcacaaagtcactcctatcactcaggaaattccaagggtttttgaagctctatgccaagaaccagtgcaaagaccagatacattcctaattatactacacatctataactcacattaaggcacacagtttccaatatatattcttttatttttgactaacattatattaaaaataaataaagttatattaataccaatggccctggctatttatgttgatcagaagctctgatttttagatgtatttttcatatgtgggaaaaataggaaaatgaattaatgtttggtaataaatatagattagcaaggcagaatcattcaaaacatgggatccatatagaagataccgaaaaagggatccgcggtggtagaaatgttgggaaaggctgccaggatggacccttgcagataggaaaagctaatctatgatcaagtgttcatggtgagagaaggcacagccccccttccctcccgaacacttcctctctggtgggaacaagattggtgcagtttgacatatgaggacacagtcatctcatttccactgttaacccagaggaatggcagtagtggtagaggctcttaggaaaggtgcaatgtgctaacatgagagagaaatttgggaagataatgcctttcaaattctgtcccatagaagacaccagccctgggcatttggatgctgttgttcctgggttcaaagagtttgtgagtgtcctgtccagtttcatactccttgctttgacacagacatcccattagacctttctttcctgatgtgattgctcttctttgctatgcaaatttaaaacgtgtgaggagaaagctgtgttcatgcatgtgaatatgctgaactcctcctctggtctccctcacatctaccacatccaggaatggaagatcaagcttggtgactattttcactgaaagagacttttcacatcccaagcagaacaggcatctttcctggttaggtgctgttcaagtctgctgtgtgttttaaaccatgttccctgaagctgctttaggtaaatattggcattcagacagatacacaaatggtcttttgcagaaagttgatttaaaacaggttagacctggatttcaaatcaaaacatttaagctttgttttgggacaaagcctggaaagtttctcatctgagtgagaacagagaggcttcctaggaatgagtggaatgaacactaaaaagctgttctttgccattctctgatgttagcccaactgtgaaggagggagggtccctcttttatatttaatcatgataaaactatagtatgcaaagctaatgtttaaccattggaaaagcctggtaaatcagaggtaaagaggaaaataaaaagctctagatcagaggaaggaatgtaaagtggagaaggtatgatttgttctcttgaaagtctatttttttggtggatgtaaagcagttagaaaaaaagaagtatatagagtactgagcaataaaatgaatacacaggtctcacatgaattataagagaataaatcaaaagaggagaaaattctcaagtctatcccttcattatcagatctttatttctttcatttgtaactctttgtgtttgattcagtacctcacgtaggttctggaggcatgtttaaataggagtagtgacagtcccatgtgaacagggtttaagaaaggtgaagattgcatttgtagaatttttaccatatggcatggagctctgaaaagtctgacaccggcatttgagaattattgaaagaaacaggatgcagaacaagaaagcatttttaattcatttattcactcaactaatatttactaactatcttttatatgccagatattggctctggcaacacagcagagaaagagaaataaaaaggatggcacctacattttattagggaagacagacaataaatgaagaaataaatgtacagtataaaaagacagttttaagtgctctggggaaaagtaaaggtggataataaatatgatggggggtgtgattttctgctcagatataggaggagaagtcaacgtggcatgagatggtgagctgagggaatatctcgggaaagagcagccaggcagacggaatgataagtgtaagccctgaggcagatgggcaagacacatttgaatgcaacaggaagattcccacgaagcaaaaacagggatacaagattacaaggggattgggggaggtattacaattctcttttatggtactttattatcctccaagggccacagagagtcccaagaagtcttcacatggactgttcaaggagtttccattctctaggtttactttacattaggaagcattcttaaatttgctgcaacttcttgttgggattatcgctttttaaaaaaactcataaataacccataaaataatgcatttaccatcatgtccagtagacatcatttaccttggccatttatgtaagaagtattctgcccagaatattacaaacaggagacatccctgatcccagtccctcacaggtttctcatcctcataggagtgaggtggatagagtaagtgtccccaaatcctgcaaagccagtgctgtggtctaaatgtctgtgtcgttccccctcccccaccaacctgccccttattcataggttgaaatcctgaccttcaggatgattgggcgatgggatctctggggggtgattaggttaggtggggattattgcccttttaaaagaggtctgagggagcttggtcacgtcttctgccatgtgagaacacagccagaaggtgccgtatatgaaccataaagtggaccttcactagacactgaatctgctggcaccttgatcttggaattttagcctccagaattgtgagaaataaatttttattatttataagacacccagtttgtggtattttgttatatcagcctggaatgctaagacagacagccaccgttctctagccaagggccatttaagaagatgtggattctgcacttcagtgagccaaattccctatatttctccatatatccaggaagatataaattctctatatattcctgttagattgcaggacccttagacagggacgtctcccgcagaagttacacatgcacagggctgagtatgtggccagaatagccatgttagtcttcaaatctttgtgacccttggccaagagaatttggtcaagaactcttaactaggttaagcactttactttgattgtagaacaaagagataatctacaaatactggtgctagatgactcaaaagaagattaatacaaattatttataatctgctttaaacaaatacatgaaaattattctgagaaagatgttcatgttaataaagtctctggggaggccaagtgtttcaaactcaatccagatagttgggtttgctacctttgtcagagaaaccctgagcgcttggagagacaggaaggaagatgtaacagaatcaccagacacagtcatgcatttcatgtctccagtgtactagaaaacactcagcttctgaagtatctcccaaatctcccagaatacaataggaactttgatttctagactattgatacttgaaggaagcaactcatcgggcagccaaccatctagtgtagagcttggagaaagtccacactgtgagatgtcattgtcttgctttcatattcttacttagcaaactaattcacagttatgtattaagcccctatctggggactgagcactgggctcccagctggataaataggaatgagtgaaacaaatgtctctgccttctggaattttattttagagggggtggagagacagatataaacagcgagaggtattactcaatgctgagtgccctaacaatggagaggtggctgagatgcagaataacagtagaagacctactcagatcaagtgccaaagaagatctgttagagaagatggtctttaaggagaggactgaaggtaaaaatcattccagttagagagaacaacacaaaccaaggcattaaggtgggaaagagttcattgtataccagcttgactttcaaagaactgaagtgtgggaactctacctctcatctggagagagtggctccagataagagtcatgaaggtggttgggccaaaccatgcagggccctatggaccagtgtaaggagtttggactctattcagtgtgaaataggggagtgacaagatctgacttagattttttttttttttttttttgagatggagtctcgctctgttgcacagaccagagtgcagtagcacgatctcagctcactacaacctctgcctcctgggttcaagtgattctcctgccccagcctcctgagtagctgggattacaggcacctgccaccacgcctggttaaattttgtatttttagtagaggcagagtttcatcatattggccaggctggtctcgaactcctgacctcaggtgatccatcccaaagcacagagattacaggtgtgagtcaccccacctggcccgacttagatctttaacagatcccttggctgctatgtgggaaatggctggagatgggaagtaggaagtagagaggaacatgactcagatgttcaagtacgggagagcgatgattgtgagttggacaagagcaggagcaaagaacctggggaggagcgcccatgcgattatcttcttaaaataatctcagcaggccttgctgatagatggaattcagagggaaatgcaggtgaaggaatcaaaggggactcccaggtttctggtggctgatgattgctccttttacagggatggggaaggttgaggaaactgagcaaattggcgatgagcacagaaactggagccagattgcctaggttcaaatcctggctgtgccacaaactacctatgtgaccttggcgagtgtcttaaccgctctggaccctcttttttctcctctataaaatcacggtattaattgtacctacctcatagggtggttttgaggattaaatgatcaggtatatgtaaaatacaagtaagtactatgtaagtgtcagaagggggaagaaatagcttgggaggaaacaatgagttgatataggagataatcaaaacaaatacatggaggagacattgaatatacaagaccagtgctcagaactgaagtctgggctagagctataatgtgggatttttctgtatacagaagagggagtggaagaaataacccacagcaggattagagggaaagaaaagagagagccactttccactttagaattgcgtattttatagaggtcagacaaaggtgagtgcatcctggagaggcgggaagaaacctaggaggtgaggcacaggagccaatggaaggcaggctagctgtgagtgacacatgctccaaggggtcaaggcttcttattataactcatgtgtcatggaaaatacaacatcaatggcttgtttgtccctgtcttccctgatttctgaatctcattcatctttctactccatcccacaccctcctctgttctcacattccagtcctcttgctctgacactgccctgatgatgaaatcactctatttaaaaaagaaaagctgaactattcacagtagcaaaaatatggaataaaactaaggtttatcaacagaggattgaattaagaaaatgaatgtagaatactatactatactatactatagaatactactcagccactcagccacaaaaaaaaaaaaaatgaaatcatgtcttttgcaggaacatgaatggaactggaggccattatcctgagtgaaataactcagaagcagaaagtcaaataccacttataagtgggagctaaacaatgggtacacattgatatagagaacggaataatagagattgaacacttcaaaaggtgggagggtgggaggggctaagggctgaaaattacctattgagcacagggctcactagtcgggtgacgggtacactaataaaagccaagacttcaccaccatgcaccatctgcatgtaagaaatctgcacttgtaccccctaaatatttttaagaaatttaaaaaagaaaagctgaaaagtatgaatattttttctttgagtgagcccaagaacaaatataaactttttcttcagaactttggacacattatgaacaaagccatgttgtcagcctggcatatctcagggatcccagcgtctgccagtcttgcctgctgtggacgttcagcaccgcctactccttactgccctgtgggctgcagagcatgcctgcggtggtggtgggaggcttctgtttgtgcatcatcttccataggcacagtgatcattgccagccagtggcacttctaggtgaggaggctcttaggcgaggcccccaggatttgccctgtaggaaccgcttggttaccagtatttttctctggcctttacctgctgtattagtttcctagggctgctgtaataaagtaccacaagctgctggtttcgaatgacatgaatatattatctcacagttctggaggccagaagtctaaaatcaaggtgtggtcagggccgtcctccctctgaaagctgtaggggagaacttcttagcctcttcctggtttctagtggtttactggtataggggagtaacagtaatccccataggttcttagttggaaagcacctttgttacaaaagacagattgacaagagaaaaccagacagaagtttattaacatgtgtattttgagtatacatggagacaccaagagaatgagtagttttcagaggtggctttgaatttcagcttatatagcatcttcaacaaagaacagtaaattttttgtaacaagacaatagaaaaggacctttgaatctctgtgggcagcaacttgcaggtggggcagtgaagaaaggcaaataacttgcagataaaggttagttagtacagcttgctaatataaattcttctaataccattgtcaggctgataagggtcttaaactatcttcagtctttaacctttgttctccctggtagtcaggagggcagaataccttttgtcttcataaatctttgtcctgcttttaggcaaatggaggaaagatatctcttgagtatctgtttcttcttgtcttcaacaatccttcatgttttgaagaggcacattctggtctcatactggcagctcgcagctgcgtaactccagtctctgccttcaccatcacatcacattctttctgtatgtctctgcctttacatggctgtcttataaggataccagtggtattggattgggggcctgccactgtgacctcatcttaattaattacatctgcaataacctggtctccaagtaaggccacattctgtggtactgtgggttaggactttaaggtatttttttggggagacacaattcaacccataacacctgcctcacttgactgcattttatttcagggctgtttacagtaaactttctttggttttgaaaaatgctttttactggaaaaattgaacaggaagtcttaacaatttccaagtttgattgctttattttttataatctactccatttttccttgtatcataaagcttcatgacccaacatagcatcttgacattgaacagagagccatcgtttctccccggctctttgagagctccttgtcctggagttttatctggagctttgatttgatgcctcaatttttggatgtggcctttatagggctttctgaagtgatgagtgatctggcttcaccgcatcttcaaaatgtccctgcagcaactgctattcttgctctgtagcatttggctttaaatatgtttcatatcaacagggttggcaccttctgtttttctcttccactcatccttctgaatgtaaatgtttaacttcttgcaaacacagtacactttgcataaagaaataggtacaactggcttttgtgagtcaaaaacagactggcctctcccaggggcaatagcaaacagctccctaggcccagcttggccaagcagtggcttcaaggtgtcatgtgctaaggctgacctccgaaggatgattttagaagatcaagggagattatattgtcttgaaaaagatggtttaaatgagatgaaggctagtctagtttaggagcaaagactgttggaacagaccacttactggctgtgggaacttagacaagttacttaatcatcagtttcatcatctgtgaaaaggatttattatatctaccttataagtttattgcaaggattgaataagcaaatgcaggaaacgcgcttagcacagtacttggcacatagtgattagcagcaattgttcttagtataaagagctcctgttactttccccctttatctagacattctttgctttaatttgttttccaactggcttcagcagcatttttcttttggaggcatctgaaggtcaagtttcagaaaaggaaagcaactaaatgtgtttaaatgtgtggatggaaatctgatcaaaggcaatttttttttttttaaatagactttgccaagtattcaggtgatgttctacgctagcactgactatgttaggacactagggttactggaaataaactcagccaagtattgattagtaatataaatgtcaaggaattaagcttgcagtggagcaggcaatgcaagcagtcctgtttggctgtaaaaatgccgacattcctgaagcgatgagctcatcattaaattcttcatcttccacacccataagagaattcatggcttgtttgctcatttttgctttggttttctagacagctaagaaggaaataaagcagtgcttcttaaactttattgtgtactagaatcacctggaaggtttgttaaatcgcagattctgcatcctggccctgcagttgttggttcaggaacactggggttgggcctgagaatttgcatttctgtcacattcccgggtgatgctgatgcagctgcttcaggaaccacactttgagaaccactaagatgaactccctcgaggcattgtgatgtgacatagagcagggggcattttagtcataaggtgatgggtttgagtcctggggctgtccttattagcagagctcttttaagcaaataatctctgtgagactgggtttcttccattttcaattagaaataataaaattcacctcatgaaggctcttgtaagagttaaatgtttgtaaatcactttgttcatgtattagttttaaaagatttcattaatctttgattgtaagattattttgtaagtcatgtaatatttccgaatgatttgggcaaccaagtctatcaaatgaataatgccattcgtttaaataatggaagcagttttaaatatttcactaaaattccacttcagaattcccaagccctttttcaagttggggtgtgtgtgtgcgtactttcttccccccttgtaattaaacaagttattcctcccccatttaattcttgctaagtactaaattgcataataaattgggaatttcctccttctctaattctgtgcattggcattttagcatattttgatgtgtaggtggtaaaggccagtgaaaagttcacagctggagtgcaaaccctgagttttcatgatgcatgaacaactgggatctgaccacaattttgtctttttatatttagaatcagccacgtcaatatctgcatggcacagaatcacctgggagcttcttacacatgtagaatttagcaccccatctctaaaacatatgattcagtatatagaaggtgtgtcctggtcatatacatttaaagtatcactccaggtggtacagagactgcacttcatgaaacaccaggaatggtctggaatagtctagtttgcttttaaattcagcctctgcctgcaactagctgtgtagacttgatcaaattctctggtcttcttaaatcttggtgctgtttatgtgaaattgctcactctcatttattggggctgttatgcagattataattaacatatataaagtgcttagcatgtaaagtgtgctgggcatgaagcattcaaacaatctaacattggggtagttcttttacaatgccagacactggaaggtggacaggtaagatcaacacaaaagttcctagatggatagaagtgaaatgaagccagttggctctgtgaatccataaaatatttatcaagccttggagaaagagaattcatcaaaaattatattaaagtgactaatttattttctttctttctttctttctttttttttgtgagacacggtctcactctgtcacctagactacagtgcagtgacacaatcacagctcactgcagccttgaccttctgcgctcaagtggtcctcccacctcagcctcccaagtagctgggaccacacctgcacaccaccacacctggtaattttttaatattttgtagagacagggtcttactgtgttgcccaggctggccctgaactcctgggctcaaatgatcctctgtctttggcccccgaaagacctgggagtacaagagtgagccaccatgtccagactaaagtgactggtttgttacaggtatcttcaggtcaggaacattcacaactagtttctaacttgcaattattttctaggttctaaagttcttattttagatgctataagattaaacagtgtttgagtgtattgaaatcaattattcagtctaatctaatgaatcagcagactatcatattttactgtgccagaacactaattttccattcactttaatgtgacagataatgtcctttcatgaaaatattaaacccttcaagagagccaaaatgaacccatattaatacaagacaacagagccaatactattcagtaacaggatagaaaaatgctgtttaaaaggaaatattattactgtaaagacagatttttattcaagaagttaggaactaccacataaatctacgtttactttgatttttctcaacatctttgtggctgtccttctttagtctcataagcaattttaaaatattttttctatattatggtctttcccagcttactgacatgcttctaatttacatgcttaaaattagtagtgtggcattttttacttccttgcaattcctgaagatctatgatgtcagtagagcttttagaaggtcttctaattgcacattcattaaacaaagcttaagaacagacagtcctaagggggttttcatttatggatcatttagtctgggattccccaaggacaatggtcaacattaattaaaacatcttgaagtctgtaaaccacagttacttctgtgcgagatgccatgatgagctttgaattatcacttgaaaaataagaagatttaggaaatttcagctttcttgttgctctcctgcaaatgctactttaaaacaaattttcttcagtgtcaccaagattaacacaacttactgctctagagaaccaatgttttatatttgtaatttgttacacaaaagaaaaagaggactcctgagatatggggtagatatcatattccctgtgtctggggggtagaccatcacttcaactgtaactgccagatgggttcttcctgctcactgtgcagacaaaatcagtccactgagaccatcacattgcagtaaagaaaaagtttaattgatgccaggctagccacaccatgtgggagacagagttattactcaaatcaatttccctgaaggctcaaaagttaggggtttttcaaggttaaaatggagggcagggggctagggaaggggcatgctgattggttggagatgtaattataggggtatagaaaacagtccttgtaggctgagtctgcttctaagtgggggccaccaaaggagttgctggtctgggtggggctgtccagtagtcagaaatgcaaaagcctaaaagacttctcaaaaggccaactgtaggttctataatagtgatgctatctgcaagagtaattggggaggttgcaaatattgtgacctccagaataatggcaggtaattatgtaactatgcctgcatcttagtaaaattcaggcccctctcatcctcctaacttggtagacttccattaattttacaagggtagtttagcttttgggaagagctagtatcatttaaactataaactaaattcctcctgaagttagtttgccccacacccaggaatgagcaaagacagccagcctgtgaggctagaagcaagatggagtcaaccatgtcagatttctcttactgtcataattttccaaaggcaatttcagagccactcctgaagtggtaggaaggtgtgcgaattatgggtttgtcatatgcctctcatatgcatgaaggaatatgcatatgtaatacaagaaagatgtcattttgaaccaatgggactttcaagtatttccttctaggttggacaccgaggaacagtaagagattatccagactttagcccatcagtggatgctgaagctattcagaaagcaatcagaggaattggtgagtgatattttacaattcctttcttaatgttgaagcaaatcaggcaagttacaatctaaaagttcagtttgctcagattggcttactcaatttaataaattgtcaggaattttctaaaattgtgaaataacgaggaaatatatagagaacccagttttattaaatcttaacatttatcatatttacttaatattaaaaattaccactgatactagtggtctaggggagatccccaaatgccgggggaatctcaaccctggctggtatccagactcttgacaccatctagagaagaaattcaaggatgggtcaaaaaatactgaaaacacagagatttattgcaaagtgaaaaatacacactcaggaaaggggagtgtgagtgtactcaagagacagtcgtgcacaagggggtttggggctgttgcctttatgggtttctttaaccaaggggtggaatagtcatgaagattctgggaaaaaggtgatttcttgaaactgtagtgccacccctttttacaccaaatgtcggtgtttccggaactgccatggcactggtgggtgtgtgattgagtatgttaattagcatataatgagatcctaggagaatcctaggtcaaatccagcgccatgttgggtccagtgggtcttagccagcttgatccacactatgggttttcagggtcatatcagcccctagtttctgcagctatttcaacagtttccttttgctagtcatgtgaaactgctgcctggaattttctgttctcctgtgaccatcctgtattagtcctatctaaccaccaccaccactgccaccaacaacagtaataattatcataataaatcattacaaatatggcccccttggttgggcatggtggctcctgcctgtgatcccagcactttgggagggggaggcaggaggatcactagagcccaggagttcaacaccagcctggcaatataaggagggcccttctctacaaaaaaactcaaaaaattagctgggcttagtggcttgggcttgtgatcccagctacttgggaggctgaggtagggggatactttgagccagggaggttgaggctgccctgagctgtgattgtgccactgcactccagcctcgatgacagagtgagagtctatttcaaaaacaaaacaacaacaacaaaaaaacccaacacaatcccgtcagttcttcctggatttcactcttgcccctttccctagagataaacaccatcccaaattagagttcattcccatgaaacttttaataccataactacatatacatgtacatattgttatgcatggtctcaaacagcataaaatgaaatcatactgtatacattcttctgcaatatgtttttgtctcttaacattatgtttttgagatttatccatgttgatatggtgagctctagtgcattaattttaactgcatggtagtctattgcatcactatatcagaagatgggaatattgatggaacatttaaattgcctacaattcttttatattgcaatataaaaatgctgcaatgaatattcctctcatgtctcattgtgcatatttgctagcatttctctagaatatgacaagaactggaatttccacattgatggggatgcttctcttcaaatcaactagaaattttgccatactgctctctgaaatgaatgcagaaattagcattcctttcagcaatgtacaagacttccttttgctccatattctcaccaacacttgctatagtaagactattccatttttctaattaagtgtgtctaaacagtatcttatactgcatgtgtgtttgtttcctgtctctactccaatgactgatgcagttaagcatcctcacttgtgcatctgcttccactttcatatgtcaataaaatataaaatatattttatctatttttttcagttggtttgtcttctttatgattggcaagagtttttttataattcctcaatacagactttttaaaaaatattacaagccatgaaaatatttcctataagtttatggttttttttttaacattggtgacatggtttggccctgtgtccccacccaaatctcatcttgtagcttccataattcccacgtgttgtgggagggacctggtgggagatgactgaatcatggggacaggtctttcccgtgctgttctcatgatagtgaataagtctcacaagatctgatggctttataaggtggagtttccctgcacaagctctctccttgcctgccaccatccacgtaagatgtgacttctcctccttcccttccaccatgattgtgaggcttccccagccacatggaactgtgagttctccattaaagagttccttcataaattgcccaggctagggtatgtctttatcaacaacgtgaaatggattaatacaattggttacagtaatttttattgcatagaagttttaaattttagtgaaatcaagtttaccaatatttttgtccaggatttatgcttattgaatcttttctataacgaagtcataaagttagatattctcctactttttttttcaaagttttgaaattttatttttcgtattatgatcttaaatctacatggaattagtgttcatggatggtatttaaaggtgtctcattttattctatttcatgtggacatttaattgtcccagaacaatgtattgaagagctcttccttttcacactgatttgtacgtaatatcacctatgttttatgcttccctatttttctcttctctgttatgcttcatttatctatttggccctcccaacaccacattgtcacaattattaggattttataatgacactaaatatctaccaggcaaggtctttcttggctctttgccctcctctatgaattttaaaatcagcttgtcaaattcaataaatatactatattagaactttatatcaatataatattatgttttttctgcctgtttgaggtttattttttccatttttcaatgtaagttatttcttcatttatctcttgatttccttattttttttttaagagagaagggcttgctctgtcacctaggctcgaatgcagtgatatgatcacagcccactgcagcctcaaactcctggatcctatggcctcagcctctggtgttgctaggactacagatgctcatcacaatgtgtacctaatttttaaattttctgtagtgacagggtcttgctatgttgcccacgctagtcttggactcctgggctcaagtaatccttctgccttgtcctcccaaagtcctgggattatagatgtgagtcactgcacccagcctgattgccctatttatatctagtgttgaatagactgtttcatgaggttaatagtctttaaattctgtcacctctttttaaacattatgtttcttcatgaatttgcactttggcttacaggccttctttaagaaggaggttattgtttatgagcaccacttctgataggttctgagttcagaatgaggtatcataacggtgtttgcattagggatgggtcagacacagtctctgaacctgaggcatcttggcttagtttttgatcttgggcatgtttaaaaataagagatgagaaactgccaggcatacaaactacacataactgcaggtagtttggtatagttgtagtctaggtgcataggttatagagatgcagagagggggtagaaaatgagaacaaagacataaggcaggagagatcataatgagctgatacatgagctaaggggcttaaacttcatcctgaagattacaaagagccattagaattttagccaagggggtgacatgatcagattgtatttttaaacatttacttaggcagtagtttacaggaataattatatgggagtcacattaggaggtgatttaggttatccaggtaaaatatgataaggacacaggagcagagggcatgcagaggagacgacaaatttaagagatgcagataattgctataatatagagaataagataaagaaaggaatctgagatgattcccagggtttttgcctggatgactatatccatagttgtggatgagggaacataaaaagaaagacaagtcagagaggaaatacaataaattccacccagaatgtgctgagtttcagatacttgtgcagttgtggtggccggtagtgtactgacacagatgctgggtacaatacacagcaccaaattggtgctcagacccacagagcacaaatacactttaatctgattcggtatttatttaactatgtgtaagaatacaaaaccaaagacacagaaaggcagcatctttcattgggaggcccagcagctaaccaagtacacagaagcttttgcttcatcattgatgtaagctgtgtaccactgccacggaagtgtgtagatgaggtctgtgagggtcaccttgacacaaagaagttgagcattgagttccaggtgctcttttatacctctctagtcatgcatgctctaggcctgcaagccaattcacagcttcccaaaccaggtatcatcgtgggttgggaaattaattagacacaactttccacgtttttcttactactgtagtcaccaagataagaatgaccttgaggtcattcttaggcaggccagcatcagctctggcctgatgttaccttttgcttacaaacaattcattttgtatatgggtttgaaatttatgagagaggccgggtacggtggcttacccctgaaatcccggcactttggaaggctgaggcgggtggatcacctgaggtcaggagttcgagaccagcctgatcaacatggtgaaaccccatctctactaaattaaaaaaaaaattagctgggcatgattgcacatgcctgtaatcccagctacttgggagactgaggcaggagaatcgcttgaacccgggaggtggtggttgcagtgagccgagatcgtgccattgcactgcagcctgggcaacgagagagagagaaagggcgaaggggagagagagagcgagagagagagagagagagagagagagagagaaagggagggagggagggagggaaggagggagagagggaggaaagaaggaagggagggagggagggagagagagatgtggaagaaatgcatgagagagatgtggaccaaagatagaaatatatgttttggggtcagagatttgggttcaacttcttgctggaccactcagcagttgtgtgactttggcaaggaagataagttcgtgtcttcatctttagtacagcgggcccctgtgaatattaactatggcaatgaataaaagggtgtttcatgcagggcagattttcaataagtgttggttcctgttttccagaggaagaaatattttgatatcaagtatgggagagagataaaaggcaataagacagtaaccaaacctcataaaggtaaaaaagtcaagttcaaaagtagtaggttgttttgtctgatgtacagaaaggagtatttagacaatgattgtttccttccccccaaaactatccaaataaagttaactttttttttccaaaactcaggcaaacaaaataaataaataaataaataaataaataaataaataaaattccaaccagataagatgctagaaattaaaatgccttactctctgcatttgtctcaggccattgatcattttgcttttgttcaagacaaatgttgagcataaatattgagtaaaataacttttgtttcatttaggaactgatgagaaaatgctcatcagcattctgactgagaggtcaaatgcacagcggcagctgattgttaaggaatatcaagcagcatatggaaaggtaaggtcacattaacatgacaggcagtaaagagatcattaatgtaccatggtcgctcccacatggttatgcccacagtcttctgtttcaggctgagtgtaacagaagatgccctgtgcatccagtcaggagcctggaatctgagtcgtggttttgccttgaactagctgactggctttgggcatgttacttggtctttctgggcctcagtttcttcacctgtaggataaggtttgccttagcccagtgggttctaaaccagaagtgattttgctccccaggggacatttgggatgaatggagacattctgatgatcacaaacaggatggtggggagtacttctagcatgtagtaggcataggtcagggatgctacaagcatctgagaatgcgcaaggcagccctccacaacaaagaattactaaggaaactatctgactaattctgtcttaggtaaccttttatttctcttttaattttaaaatatttatgtagttataggtttaattcattcagcaaagaaaatttagtaattaccagaaactatataagaacaagtaactttgggaggctgaggcgggtggatcacctgagatcaggagtttgagaccagcctggccaacatggtgtaaccccatttctactaaaaatactgaaattagcctggtgtgatggcacatgcctgtaatctcagctactcgggaggctgagggctgaggcaggagaattgcttgaacccgggaggcggagtcttcagtgagccgagattgatccagcctggaaacagagcaagactccgtctcaaaaaacaaaataaaaaggaaaaagtaaaagtaagacttggtctttgctatacagtttatttgtccaatgtctatttctgagtactaatctgtgttaggagatatcctagacattggaaatagactggtataaaaagcacatcctgccttctttcatggagctaacattctattagaatataataaacaagtaaataaaaataattcagatatgataagtgatatgaaagaattaaaatggttgatatgatagacagtgactggtgactggctcctgcagatagagtgatgaaggaatgtcagtgaggggttgttacctcactccccactaagcctaaacaatactaggggttctgccctgcttgatcaggagatagtatttaaggtacagaaaatataaaagccctgaagcaaaaagaaactgggaatatgtgagaaataaagaattccaatatggcaggaatgtagaaagtgaagggggcagaagaaagagatgaggctggagacaggttgagaacatgctaagccttgggtcttggtagggtttagattttattctaagggctacagggaaccactggaggtttgtaagcagaggaataatatactgcagtttttatttttaaaggattattttggctgctgtagataatgaactgtggggggaaaaggtacaaacagacccggccaactgttgagagggtctagtgaccatccacaggcacctcaggaattacctcctgggagtgttctccaggcccccaggctccattaagacacccttctctgagctccctttatcagataacatattatattgaaattttatctttgaatatttctgtttttcccatgagggcagaatgccttaggataaggactttgtctaacttacctttaaaggactagcacagagcaggtgcccagaaaacatttgttgaattgagtgaattgcctagcttcagggcaagacaacactttcacatacagagaaggtgaatgatctattggccttttggtatttccaaaatatggaagaaagatggaggtggaggggaacaaccatttctcacagtggaataggatgagagctgtgaaataagattcagctgcagtggcttggattgaggacagatggtagtgaaatttaccatttagagaggaaaaaaacactgtggcaattaaagcagagttgataacactgaatgccaccccatttgtttcagcaggaacatgccactgctgcaccccccaggagtgtggttgtgtcaatctgtgcccacagcgtttcagcaggctcagaggctaccagcctctatttcagagctgaaaataatcaggagcaggaacaaacattattcagtattatgccattgaatattgaaaatagaaaccctgttacccccctttaagcaggggagatggactgtacttaggtgtgaaaacagtgctcaaaacaatatcaataggtaatgtctgtaagaggctaaattctagtgttccatcgccctgtaggataactatagttaacaataatatagtttcaaatagctagaaggaggatattgaatattcctaaaacaaaaaaatgttacatgtttgagatgatgggtatgcaattaccctgatctgattaccatacattatatgtattgaaacatcactatgtaccttatgaataagtacaattattatttgtcagaaaaaataagtctaatgtattgccacacttagggttttcttttctttacttgttgccagaaaattgcttctgatgccacctagttccacattctcaccagagacaaatgaccagccactgtcctcccttccccttcctcttggagctctttgggagttactgagaggcaagacaccgaggaagagagcacctcccactgaagctgggcgtgaatttataagggttcctcttcctcttcccttaccccaatctaagcattgaaagcatggcggatctaggaaatgcatttgaatacagttcctaactgtggcactcatggaatcctcccatttggctctccttcaaaaaacctctacaaaacagaacaatttgggagtaattagaaaatgcagattaatattcatagaaatattttcaacacttctgtttattccctgtggatggacatgttttgtctgattttgatacatatgttcatctttcactaggtgactttagagaaagagaaaaaaagtatttcacatttttccccttggttttttgattttaggagctgaaagatgacttgaagggtgatctctctggccactttgagcatctcatggtggccctagtgactccaccagcagtctttgatgcaaagcagctaaagaaatccatgaaggtatgagccccccacaagccatttctgcccagggtttgaccaagtcatcaaaaatagtgactttcttgcagtgcacacttgtgatgggtggacttggatgcccttttggtctggactctcccagtggtagaatgactctgaaataggcaacagctatagaaccttaagcccaaatgttcctgggctggaagaattttgtcatatcctttgtttgacatgaagagtcaagttctctaatttgtcatcgttgaaagtaaatagcactatgattaaccccaacactcaagctaaaaacctagcattatccttgagcccttgttttctcttacccttccaagctcccaaatctatcagcaagttccttagttttacttcaaaatccattataaatatgtgcacttctctcaaaatccattgctactgttctagtctgaccaccatcatctcttgactggtccatatcaataggcttctaactggtccctttgcctccatttttgcccatctcaaattcattctacacagaatagccaaaattatttttattaatttattttaaaaatcagattatgctacttacctgcataaatttccaatggctttgtacgcttaaaatccaagcttcttatcatgactttcatcacccaacatagtgcagctcctgtctaactctgtggctttttaaaattctatttatatcagtcagggttccctcagagaagcagaaccaataggcaggacatagactttaaaagatttattgtaaggccaggtgctgtggctcttgcctgtaatcccaatactttgggaggccaaggtaggtagattgcttgagctcaggagtttgaaatcagcctgggcaacttggagaaaccctgtctctacaaaaaataaaaaaaaaattagctgtgcatagtagtgcattcctgtagtcccagctacttgggaggctgtggtgggaggatcacctgagcccagaaggtcaaggctgcagtgagctgtgattgtgccactgcacttcagtctgggtgacagtgagaccctgtctcaaaacaacaacaacaaaaatttattggaaagaattggaggccatggtgggaggattgcttgggctcaggagttcaaaaccagcctcaaactgagcaacatagtgagaacttgtctctacaaaaaatttttaaaaattagccaggcatggtggctcatgcctgtagtcccagctatttgggaggctgaggtgggagaatcacttaagcccagcaggtctaggctacaatgagccatgaccgtgccactgcactccagcctgggatgctgtctcagaaaaaaaaaaaaaaagaagaagaagaagaagaaagaagaattggttacatgattatgggactggttaggcaagttcaaaatctgtagagcaggctgtcaggaaaggcaggctggaactcttgggcacaagctgaagctgctgtccacagaaagaatcttctaaacagaagccttgcctctggtcttaaggcgtttcaactgattggatcaggtctgccgagaaaggtaatctcccttacttaaagtgaatcgataataaactgaaattatatctacaaaataccttcacagcaacacctagattagtgtttgattgaataagtggcattatagcctggccaagttggcacataaaactgaccgtcataccccctcctgctcacccattaatgatgtagctacactggccttttctctgctccttgaacatcataagcttattcttgttttgagatctttatacatgatgtttcttccatctggaatgcttttcctccagacattttccattaattcactcaaatatattttcttaactgcacttattactgtctaaaagtatcttgtctatttatttgtttttgagacaaggtctcgcttcattgcccaggctctagtaaagtggtgcaattatggctcactgcagcctcaacctccctggcaagcctccaacttcagcctcctgagcagctgggactgcaggcacacaccaccacacctggctaattaaaattttttttttttgtagagacagggtcttgctatgtcacccagactggtctcaaactcctgagtcaagcaatcctcctgcctcggcctctcaaagtactggaattacaggtgtaagccactgcacctggccttttctatttttaaaatccatttgtttattatcttttttcatctaactaaaaggcaaacctccaccatggcagggaacctcattggtcttggcctatatcttctgttcctagagcaactcctgaaatgaagtgggtgctcaatgtattaattaataggaaggaggaaaaagaagggagcctagatctgaggcataagccatattctgccttgccatcagggaatggagttatcttcttttctgtggaggacatatgggcatctgagaagcagatggcaagatggaatttgatgtacaggagatttattttgagaaacacctgtgaaggataaagaggcgaagagcagggtaggtggggtgaaccttcagactgcagtggtggcctgacccctatgagaggagagaggagaggaagtaggctgagattaggaagagcctcagtgcatagtgaagctccgagaaaaccttggtaggctgttggggagcccctgagcaaagactgccctttggaggagttctgtgttgggcgcaagtccagtacccctgttgtttacagtcattgactgacagccacctggagagggcatgacctcagtgtgaactttggtagacccaaaggtgtggcagttggaggctgttagctaactgcgttctttgcagctgattctcttgaagtgaaatctgagcattgtttctctatggctacccaaaggggagggtttagcaggtgtaattgtaaggattagattcaccaataagtattagaacagtttctcttttacataaaagaaatccaggctgtggtggcaccaccattatcagagactcagtctccttctatcttgaggctctgccgtctttaactcatggttttcacttcctggctaaagaaggctcatgactcagccattatgtcttcattccaggcaactcaaaagagtaaaggacaaagaagggttcactccctcactctaaggatactccctgagcatacatatggtacttctgcatatatcccattggtcagagtttagtttctggacatatttcactgtaaaagaagctgagaaacatagcctttatatgggtagcaatgtaccaagttaaaagttgggggttccattactaagcaagaaagacaaaagagatactgtggtaaactaggaatctctgctacagagagacagaattcagtctctgttcatatgctgcactggccttattcaatcaagtcgtagtgtatatgacttttcttggagtcacagtgtgattcagtgaccttgatataaacaggactgagaggtaattagtccccatgccagccaggcccatgatgcacattactgaggatttgaaaggctccctgtatgaagagaatgatacatgctgatagacccagtacagtgatgcaaggatgaaatcattcaaaagtattatagagccttttctaaacatagtggaatgtttgaatgttggtagggttaatcctgttagactgtcacttctaatcttgaatgacacaggctttttcttttatactatttctttccagaattattcaattgattttcacactagagtgaaaaatttgctgtcactttattccagatgatttatgttattactaaaatatatggaaaaatagaaaacgagagcaatagagaaccttgtattgatttacttaaaagtgtcctttcatctatataaacaagataataagaccaaaaggcatgagattaagttatttaagtgttctaaaaattagattttcttttcctttttagggcgcgggaacaaacgaagatgccttgattgaaatcttaactaccaggacaagcaggcaaatgaaggatatctctcaagcctattatacaggtgtcttattttctgcttaccttcaccactgttcacacatatttgagccaatgttgcttttcctagaatcctctcaatctcttcatgaggcattttgagaagacaagacttacagaaacgagaatacattctaaaatcagctaaagactatgagtttccaggaaaaattggaatatgatctgagctagagactgctacataacaatagcattaatgctttacatttataatattacagctgcagtggattttgctctcggcaatctctcattaattgaattaaccattgtcatcaatgtaagagactcaaatcgtattttatttttaggcgttagaaatcactcagattagatccacgattttgggtgtgggaaattagattaatttagaggatgtgttgagcataaggattcaatagaagtagctaaagacctaatagtctgctggctgtgtaaaattagaaagactctgaaatgtaattctgactgtaactacccagggttagtgtgacttcacaggttaaggtcacagtccccacaagactaccttcacctcagacaccagcccacaagctcaggtgttttcaggctacacgtgcttttaaccagctggctacaaattcagggttctcactaccctctcaggttgaatagcacactagaatgacacagaactcaagaaagtgctgtgttcacaaatgcgatattatcataaaggaaacaaatcagggccaatcaaatgtggagactgcatatggagatatttggaagggtccagtggaagcttccactctcctgaccattgatatatcattaccaaccagcaagctcacttgattattggtagccttagtttttattggggtttcgttatataagcatgattggttgaaccattgttcatgtgattgaaccagtccacctacactccccagaggtcaggctgatattgtggctcaaagcctcaaccttttaatcatatggttgatctttctgatgtgaccagcctttattctgggtcatattgttagcataactgagctgtagtccaagagaccaaccatgaataacaaggacacacctatgacttgggaaatccaaaggatttagagtttacctcccaggaatcaggaataagaccagcccaattctctactattcaatggccccatagaaccctctccaagtactttaagggagccacagtttctctgtttgtgtctcacagaggtcagttgtgtcatagcagcttttgcagtgggagaggtccaaagaaggagtacatattggtcctcatgtaggtgttaaagaggatgctttgggagattcttgttagaaggtaaatacctcaatgtcaggtgactgttttgttattgatgtaccaattgggttctaatcagaaaaacagaaacagcactaggtattttgacagatagaatgtaatataaagaactgcttaaagggccgggtgcggtgactcacgcctgtaatcacagcacttggggaggctgaggtcagcggatcacaaggtcaggagttcgagaccagcctggccaatatggtgaaatcccatctctactaaaaaatacaaaaaaagttagatggtcatggtggcgtgcacctgtagtcccagctactcaggaggctgaggcaggagaattgcttgaacccaggaggcagaggttacagtgagccgagatggtgccactgcactccagcctgggcaacagaatgagattccatctcaaaagaattgcttaagctgggcacagtggctcatgcctgtaatcctggcattttgggaggctgaggtgggcagattgcgtgagccaaggagtttaagaccagcccaggcaacatgacaaaaccccgtctctataaaaaataccaaaaattggccaggtgtggtggtgcacgcctacagtcccagctcctcaggaggctcaagtgggaggatcacttgagtctaagagattgaggccacagtaagccttgatcatgccactgcactccagcctgcgtgacagagtgagaccttgtcttggaaaaaaaagaagaattgctaaacacctttcagaggactgaaaaagcaaaaagggaacaaaaggattcatgcaggttataaccccccagacctgagacaacaaaggaaagaggttgaggctatcagaaactggaagctagaatgagggacatacctggctgatgtcgggacctcaggggctcagagcagaggcttaaggagcaggagttcagatctctgaaaagagggctccatctgtaggtactggagccagtacctacacgggggtcaaagtgactttttctaggaagctggagccagttgctgctgtcggggtgaacagccttccctgggttgacactgacatgactagccgtcagatagcttgcacttctttccacctcctgccttccagtcccctctactccccagtactggtggaacctaatagggagcgggtacagacagaagtagacaagagaattgcttaatcattaatgcacaaaagagtatgttttaggtgtttaaaatatttcagttcaacaaggtttacatattttacaaaacccatcagaaccaggcactgtttcccaagttggcttggtattttctggtgtttcttagaagagccactgctccccaagtggacctgccctgtgacagatccctggagcccagcatttaggtacaaacagttccaggatgtgagctttatgaggatgaggattttcgtctatgttgttcactgctgtatcctcagttctaagaacagtggggcagataagtgcaaatatttattaaatgagtgtcctcaaaattgaggttaaggtcttaagagccaagtgaaacttttaccattcaggatagtgttgtgcagatatgacagatgataatagcacaaagttaccagagcctcaatttctatgtgagtaatgctctctgaggctacaaaggatacaactgcatcaaggttaccttggttactagagattaatgatacacaagaagatcaagaaggaaattgtctcaatcatgcatagccaaactttacagagattaaagtcacagcactacccgagggacccagttatgttgtcactctctcggcagcaggcatccattgctccccatgctaatgttttccgtgacagtaactgctcctcttcctttttgcttctaatgttcttgacaccagcaagtaacatcccctcccctaccacatggtgtttgtctacccaaggcttataaatatttgtgcatagcttttggttattcttggctactgttttcttcattatttccaggagtcttttggttctttgttattctattgtctttgtctccttttctgtgtcactcgctccctaagagagaagatacaatgggttcaggaagtcactatcatgttggccctcataaagggaccagatgtcttctacagcttattcagtacagtggcacaatagagtctaaataaagagagatctaaattcttaacttttttcggtattctaaagtcaatggtgtgtgagagagagaacactgaaacagggatcagggactcaaagttctagtccaggcacctgtactattaaaatattctatttgattttatactctactgtgcctcaaaatggataaagtagttgtcaacttaggttgaaataattttttactctaatatcccacaaaatatttgaaggaaagggagaggctgtgtgaaatgacttataaagtctcatctaaataattccaaaattacaaaatacttccccaagttctaagaaatgggatattcattcttctacttgatattttcaaatttaaagttttttatctaactagaatgaaggatagatgtaacaatatcacaaccattaggtttaatgatgcctactaaatattattatttagaaaaataacacacttttttggtggattttgcttatatgaattgctttgaaaagttacagatttcataaaaaagagacttactaaaatcatgctgaagaagtttccatctcagcgcagttcttgctattggataatctcatatcactttctataattgtctttcattgatttaaatagatgagaattctcatggctagtatggctaatttatagaattcttgagaatggtgcagacagttcagatagccacatggtgtcacctacaacaaagggtatagtggctccaagagaatcaccaccccatggatggggcagacagagatttaagactgatgggcactgcacatcacaggccatgcaaaaggggctacaactagtcagtactaaaatatatgaacacacagttggcatttgtaaagggaaatggcatgttttgggtagctttcttacttttgggagatacgaaaaaatatggtttaattatattcattaagattagggttagattcgataaaacagaaaaattacagtggcttacaaaaggtagaagtttatttctatcatatgtagaagtctagacattggcaattctaagtctagtatgacagctactcaaagcttttaggaactcagacttcttcttgattacttttatgccatcactaagaagtggtccttatcttcacagtccaagatggctgcccaagatgcagatatcagttcacatgtaaggcagttggatggaggaaggactaagatgaacatggcctcatccctttaaggagatttgtctgccttcatttcattgtgaataactaagttatagaactgtactagctaagaggaaagctgagaaagtagtttttaagctgtgtacattatatcttgcttaaggttagggttctcttagtatggaagatggccagaatggaaattgaaaggcacactagtagctcatccaccccagcttttccactatgcatcccttagtgccattgtcagatgaaataaaccaagatttgctccagaatgacaactctttctattcttttgcatctaccacaacacagtgcagtaagagttacaagaagaatgtaccatctcacaacagaaaagcatgaagaaattaaataaaagggcaagatttatcttatcacatacccattctttgctagtgttggcatttaaacttttctctgttttataatcatatttttcagtttgtcaaggcttaatttcattctgatttggtttcagtatacaagaagagtcttggagatgacattagttccgaaacatctggtgacttccggaaagctctgttgactttggcagatgtaaggttttattttttattttttaactccccagtaagctgcatgctcaataacaatttttagggagtttaaaaataaccaaactgagacaatgagttcacaattttccttatgaaatggtttgttcattttacattttcattgccaccaagcaatataatgtttaaccaagatcataaaagcatacataatgatgtaacaacaaagaaaacttatttgagtcagtaagtggaggtgttttggtcaggtttcacaattttgacattagaagacattctgatacatcatctgacatacaatatttatttccattataagtgtctccattttaaagaacaggtttattttcttctggactctgaagaataaatatttcttttgttagcttctaaattaaataggaagcatgatacagaagaatgatctttagagatgggaattaaattgagtatcagtctcaggattaaaaaaaagaaaatgattgctgcaatttcagccttgccaccttggaaaagctgccaaactattaatcatcatgtgacctaatgaggccacaccttgctttctctttttagaaggcttatgacttttattataaagatggtaaggtcaaggatgaggtgtattcacagctgtgtgtaagagagaacgtgatttaaaccatagctcaccaattttctttcagctgatttacatagcacctaaatgtgagaaaatcccaacaacggtctcagcctcatggttgaaacagcacctgtcaaagtgaggcattatgccattaggaagcgatttatctaaattatggtttcagttactttaaatgtgaaaaacttatgaaggttgaacccacaacaccaaatttatgaagcattgctgcaaacatatgctctcagaggtatatattcctaagtgcacatctgtttgtgtatggacatgaatgcacccacccacaggaggcagtatagagtagggctctaggacagggttctagaatcaaacagggctggaatctcatgctgccaactagctttgtatatttggacaagttctttaagtcttaaagcattcattttcatatctgtaaaactaaaatactaacaataacaagtactcatagggtgttatgaagattaagagaaagagagagtatgtgaagtacttagtgatcaacacagggtggtagtggttagtattatattaagaccgatgataatcagcatttatgtcattggagcgagcgtaagtgaaagagaacaagaagaaagcaaacagcagcagggtatcagcagcacagaaaagaaaccaggcaaaaatcagacagtcatacaaggacctaatgtttaaaaataggaacaaattcattttaaactattgtagctaaatgtttcattcacctataatttgccaaataattcaggcaatcccgtgttttggttttgtctcctgtctttccataatgtgcttaagtatttgtacatgaacacacataccacacacacacacacacacacacacacacacacacacaccacttaaaccatagagcctttaatatcacagttggggatctttgaggactttttattttttcttttttgagacagagtctcactctgtcatccagactggagtgctgtggtgcgatctcggctcactgcaacctctgcctcccaggttcaagcaattctcctgcctcagcctccctagcagctgggattacaggcacacgccaccacacccggctaatttttgtattttagtagagacagggtttcatcatgttggctaggatggtctcaaactcctgacctcaatcaatccacccgcctcagcctcccaaagtgctgggattacaggcgtgagccactgcgccccgcctttgagttttttttttttttaaataaactttactttttagagcagcttcagatttatggaaaaattgagcagaaagtacagagagctcccatatgaccctattctactctctcctttcctttccattattattattattattattattattttgagacaggatctggctctgttgcccaggcttgagaactatggtgtgatcttagctcactgtagtctcgacctcctgggcccaagcagacctcccacttcagcctcctgagtaactgggaccacaggtgtacaccaccacattcagctaattttttttttttttttttttttttttagagcgagagaaggtctcactcttgcattaattagtatgtgtatttattataattggtgaatgaatattgatacattattattaactgaagtttatagtttacattagggttcactctttctgtgatatagttctatggattttaataaatgtataatgtcatatgtctatcattacagtatgatagagtagtttcactgtcctaaaaatcctctgtgctctgccagttcataccttcctccccaccaactactgatcttcttactgtctctatagttttgccatctctagaatgtcctatagttggaatcatacagtacgtagccatttcaggcaggctggcttctttcacttagctatatgcctttaaggttcctctatgtcttttcatggcttgatagctcatttctttttagtactgagtagtattccattgtatagaatatttattttacctgctgaaaggcatcttctttgcttccaagtttggcaattataaataaaacttctgtaaacattcatgtgcagatttttgtatggacatgttttcaactcctttagttaaatagcgaggggtgcaattgcttgattatatagtaagagatatttagctttattaaaaaactgcagaactgtcttccaaagtgactgtaccattttgctttcatatcagcagtgaatgagagttcctgttgctccacattctcaccagtatttggtgttgtcagtgttttggatttaagcccttctaataggttgtgtagtggcatcttattgttttaatttgtaattatctaatgacatacaatgttgagaatcttttcatgtgccatctgtgcgtcttctttggtgagatgtctgttgagatctttcaaccatttttaaattgggttgttattttcatattgagttttaagagttctttatgtattttggatacaagttctttatcagatacatgttacaaatatgttctcccagtttgtaccttgtcttttcttccacataagacctctgtgttgggttgggcacagtggcccacacttgtattcccagagattcaggaggctgaggtgggaggacagcttgaggccaggagtttgagaccagcctgggcaacatagcgagatcccatctctaaaaaaaatttttaaattagctgtgtgtggtggtgtgcacctgtagtcatattagctattcaggaggctgaagcgggaagatggcttgagccttggagttcaaggttatagtgagctatgactgcaggactacactctggcctggccaacagagagtgagaacctgtctctaaatatatatatatatgaattttcggaggagggaactgaggcccccaaaattgtgtgatttgctaaaaatttcatgactagtcaatggcagaaccagaactggagccctgagtacatgatttttctgtgcaacctgtcctgccttaaagaaaaaccactaagatcccctgctggttgaagtactatgtgttagaatcttctatctttaaaggatggcccttgttttcgtcctcctgtttagggcagaagagatgaaagtctgaaagtggatgagcatctggccaaacaagatgcccaggtcagtaacaaagcgggaaaacatttcctttacctattctcctatgtggctgcctttgcatttatgtgaaaagggagaaaaatagcagcaacagggacttttctttttttttttttcctgtttgaaagagaagcctgaagcttggggatcggaaccctaactttttgcctgccccagtggtagttatcattctccttggctcctgacagcccaatttttgatttctagtcttctgaaagtgagagatttagataatagatgatggcactgacctctgaaatacaactccgattcttctcatgtcacctctcaaaaagaaaataattgtgtctctaatatcattctcttgtgaatagattctctataaagctggtgagaacagatggggcacggatgaagacaaattcactgagatcctgtgtttaaggagctttcctcaattaaaactaagtacaaactcacattacaatcctttgtgttgtatgttgtttttacaaatgtttttgcatttagtatacaaagatctagaaaaacgaagtttaaaattgcgaagtctgttccagttattcacacttcaggaaacaaaatgggaaagctgtattgtaactcaaggaagtactgacactacacttttgtttttccatagaggctgagtagattacctagtgagtaccaggtaatagatgggggagggaggtggcagggagaagaaaagaggccaccctctagggtgagagtagaagggcttgttcctgtggaatggagaagcccaactgcttccactccacctaacagttctccctagttagccacttccagaaaagccagacactgcaggtgagtctctgttgacacatcaatactgattaacctttagctatttctgatatgaaggtaagtggtagaatggatcaactcttatcgtcagaccagctattacatggaattgtgggcacccgccctcttgctcatggcatctcctagaactgttctggaagcaacaacacctagaaaactaaaccttcatttactgtgaacatcttctgactgtggcttccagatgctagtttacagaacaaccacacagcaagaccaagcttatgctgagttgacggaacaatgagtaaacataaggatattactgtgactttgaaattctgaaattgttctttcttaacttttgcattaaaatcacatttattttataaaataatgacaacagtatgtgatagttgctttattcatgtctttgtttgaaaaacaaaaaccagataaccctaggtctctctccaaaatttctttttttaaaaatgtattggggaaaaatatacttggcttacaaaatatgcctgtatacttggtgacatatgtacaggttttgcttggggcaaatactgatcaagaaattcaaatgccttctgggaggtgtgaagtaggccatgccaccttaggaaatgattcagcacaaggaagtcttcagaattaagatttctttaccagagaaaacatatttgactagtgattatagtatcatttcccaggtgctgctataaataaaatttaaaatagcccaacttactggataaattatttattatttaactatttaggctatttaaaatgcttactgcttgagagaaggggaaagagaaagagagatcattgaagaaaatcatctagggagtttgggttttgttgtagatgatttccttaaaaaggaacaaaagaaaaacaaaaacttctgtgcccagattttcatggtttaaagagggagttttttagcttgctacttgatcttctgcatatcaaataaaaaactagaatatattcaaatgtgctcaactgcgttgctttaaataattttgtggtgcttctttttagcatttgatgaatacagaaatatcagccaaaaggacattgtggacagcataaaaggagaattatctgggcattttgaagacttactgttggccataggtaagacttcgagtgctggtaaactaagttactttgcacttgctttaactcagtgccgaggcctgctccttttgggcaagaatcctgactgatccattttttttgctccctacagcccccaacatggtccaggatacacacagtacgctcaacaaatattgttaaatgaatgcttgaagaagttatttttttaagtcttttttctttttcttttttgaaacaggatctcactctgtcacccaggctggagtgcagtggtgtgatctcagctcactgcagcctcaacctcctgggctcaagcagtcctcccacctcagcctcccaagtagctgagacaacaagcatgtataccacctggcccagctaattttgtattttttgtagagatggggtttcaccatgttgcccaggctggtcgtgaactcctgagctcaagcaatccatccacctcagcctcccaaagtgttgggattacaggtgtgagctaccacatccagccatctttttaaatcttaccttgctttttaaatttgtatttgtcttgtgaccatgtttagcttgtagacttcttgagagctgaaatattttatttctactggcatttttattgagctttgttgaaaactgagacgtaggcaaagcacagtggcatgcacgtgtagtcttacctacttgggaggctgaggtggaaggattgctggagccaaggagttcaaggccagtttgggcaacatagcaagatcttgtctctttaattaaaaaaaccacacacacacacacacacacacacacatgcaactaagacctaagccagtttggtaatccaccatatttggttatttatgaaagatatcagtggcttttcttttctttctttcttttttttttttcttttgagatggagtctcactctgtcacccagactagagtgcagtggcacaatctcagctcattgttgactctgaattgctaaaagataagccgaggaggctaagaaagggaaaactttcttcttcaattaaaaaagtagaattgagatcagtcttcataattagttctcagactgttccagtggtaatgatacacctggttaatttttttttccattttacattgttaatctttttttctttttttttctttgtgacggagtctcgctcggttgcccaagctggagtgtggtggcgcaatctcaggtcactgcaacctccgccttccaggttcaagcaattcttgtgcctcagcctcctaagtagctgggattacaggcacacgccaccacgcctggctaacgtttgtatttttagtagagacagggtttcaccatgttggccggggtggtctcaaattcctgacctcaagtgatccgcccacctctgcctcccaaagtgctgggattacaggcttgagccaccacccctggcctatattgttaatctttatattaattctgcttgctgtttttcatttggtgttcttgctaagccgtaatgtttgaaaaactttgttgagatgtacaaactctcattcactgagctaaggagcattcttggaaatatatcattgaataatgtattacatttgggctataatgcacattattttatcatgtaaaaaaagaccttataattcaattgaagttcaaaatatgttacactttcattttgtttcagtctaccattggaataaaccagtttataaaattttttattgagatataacttacataccataaagttcacccactcaaagtgtgcaattcaatgctttttaatgtagtcacaaggttttgcaaccatcaccacaatctaagtttaggacgttttaatcagccgcataagaaaccctgtaactattgacagtcactttccaatcctccccaccccctggctcctataatcattaatctactttctgtctctatagatttgcctactctgcatatttcatacacaaggaatccaatacaatggtcaacacatagtttttgacatgaaaaacgatctgagctgtgtcatcttagaatcgtgtaataggagcatactacttgccaaataagaacaaatccagacttaagtaaggagaggctttattcagtagaactatttcaatagagagaacatgttgatttcagaaacctgaaagactgggctgggtgtggtggctcatgcacataatcccatcactttgagaggctgaggcaggaggatccctttaggccaggagttcaagaccagcctgggcaacatagtgagagcagcattctgagactgttccaatggcaatgatagaactggttaattttttttccattttatattgttaatctatatattaaagattctacaaaaaaataaaaaattagctgggtaggttggtggacgcctgtagtcccagctactcaaggggctaaggtgggaggagtgcttgaacccaggaggtcgaggctccagtgagctatgttggtgccactacaccagagcctgagtgacaaaagtgagatcccatctctaaaagatggggaaaaatgtgcaaaagtttcaaaatccaacagaaaagtcttagcagcaacttttaatgttgggcaagcacaagggcatgatcactggggattgacaggaaacacgtctggcagtggacagctggactctcaagataagctgcaacagaggcatgttctgcattttagggcttgcccaggactggggacaagccagagttcaggaacctgtgggaggagagaggcctgatggaagtgtggtcaagacaatgaagagggtagggaatgggcaattatgaattcttggtcatggtaattaactctaacggactcccaagcttccctgcctatggtgctgggtgataaagcctccttcccactgaaacatactgccaccttccaaaactttcagatatgaagaacaaatctagtaggtaagaatataaagcagaaggcaagctaaagggaagaaaggatcatgaaaagaagggattgtacaaatctagttggcagggaggtgactggaaagcttaataggatgaaagtgggcatcattattttttatcaagctattatggcttacttaatgtgagttttactagtttaaatggttagtttcttgtcagagaacttcatgtaacagtttgattctaaatgctgtgtttgggtttctaatacatttctccttctatttcccttaaatcactcaaaaagccaaaagtcttttagctttccttaagacagtctataagccacgatgagaaagtcacttattcttgttctgagctccaaaattcattataaaatccattcacttttggttggattcctacctagagatcagatttaagattataaaaataattgtgttgctgtaaataggtttcttccctacagacttttctattcctattttctttttatttaaaagataatttactcttgcgtttttgtcagtttcctttttcttgttttatttctgctttacttgttatttcaaaataaagaattgaaggattgtattttttttttaaggcaactgaatttagatgacagatacttgttctaatggagtcactctaaccagcctataaattctaatccagtcatttaaaagaaaattctttccatgggaaaaattgcttttaaatggaactccagtgcccctgcgtgcctaatgagttatttggagcaacatcgctgcagttgtcaggcccaggttgttcatcagtagcccgagatgctagtagctgagcagtgtcgcaccctagggagttatcagggaaagcgtaggtgttcggggtgtctgggatccagagatgagtcagtcgctgtgggagtttctttggcaggtaattttattttccccatggctggagataattactgtgctaaagttctgtgcaaatatggtattaaaaggctatgaaaatcagggtaagcagcctttctttcattccaagtaaaagccagttgtggggaggggatagagtggtatgacagtccaaagaatctttttaaaaaacatattacttactatagattaacccaatttctattccgtgaagctgaacattatttgctttttgttacagttaattgtgtgaggaacacgccggcctttttagccgaaagactgcatcgagccttgaaggttggtctggaaagttcatgtgcattcttagcgtcccttaattcccttgggaaagtatgcaaatagtagaacaaatatttaaaaattagttattttaatgtaatttaaacattttaagataaattatattacagcaaatcaaggtatgatacaatacactctttacacagacacctgattttctcttcaaaataaacagacctgggtttatgaaataatttttttctaagtaggtataatttgatttctatttaactaaaacattctcattttctctaatatgatgagtttaagtagatgctaatattccacttgtatgaaagatgaaaattcatgtataatattaaattttaaaagttcatcctctattttaaatagaaaatgagaaggcaggccaggcgcggtggctcacgcctgtaatcccagcattttaggaggcccaggcgggtggatcacaaggtcaggagttcaagaccagcctggccagacggtgaaaccctgtctctactaaaaatacaaaaattagccgggcgtggtagcagatgcactgtaatcccagctactcgcgaggctgaggcagagaattgcttgaacccaggaggcagaggttgcagtgagcctagattgcgccactgcactccagtctgggcgacagagtgagactctgtctcaaaaaaaaaaaaaaaaaaagaaaatgagaaggtaaaaatatggcttaatgttgatagaatgtcatatttcttttccacttagattagttttctacagtagctaatttgtctactgatttgcctcataggttaatagtattctaacccatatagagataggtacagagaagtattgaccacattattttcactgcttcacagtaagtgcaggcagtaaaacttgttttagaatgccaaacctcaagcttgagacccagtagatcctgtggcctctcaaactgccttgcttaaaataaaccaagctgagttggcagcctttaatgatgccgtaaccctgtgtttgcttgtctgtctttactgccagatggtgcgctccatgagtacagactcctgtttatcctcagaccctagggccttgtgcacagaagatgcttacctccatctctttaccagccattttctgtggtcccacacgtaccttcaaagtcatatcctaagtgaacacatcctttccttcatctcgcccagccccacatctgctccccttcccctgttcagtcatcccagagaatggccccaacaggaatttgcccaactctctgaagtcgtaccattcctccccagacttcttgactatgcctcagccaccccaggcttctttccattcctcaactgtggcaagtctattctcacatcacagtctttgcatccattccttctctggaatgctcatcctctagatctttacctagctgactccttctcatctttcaggtttcagctctcctcctgagagaggtctcccctaactgtaccaggccaattggttccctttcagtcactctccatgccatttccagctttcttttcttcatatttctgatcactatttacttaagcaatagttaatttgctttgctgtctgtctccatctactagaacataagctccatgcagacagagatataatctgttctgttcaccgccattggcacagcacatggaataatgcctggctatagtcgacgctcataagcatttgctggatgaattacatagatgaatggaatatcatttagtatgttggccatcattaggtcaaaatccacctaactgctcagctagaaattttacactatctctctttttcattatcctgtagcgatacatcattatgttttgtcaatccatttacataagcaactctcaaatcttcccattttctccatccctactgcctttattctaaggatggccatcatcatctcttaattactcagtctcctcaagatgagtctcaaagcctctagtcttaactcccttatcttccttctactcctaccttgcaatctgtttctcatgctgcagtcaaagtgattttctgaaaccacgaatttgatctgatctcaacattctcatgtttaaaatattacaagagctctccacacttaggataaagtcagaatttcatttcatggttaacaaggtctggcctttccagacacatttctttttatccctctttgttaacttacgtatccttgaacgtggcgttctttattgccctaaaccttcacgcctgctatttcctctataggaagtttctctcctccctacatgaacctactccttcctcttgttgactgtttagtccttgcttaaatgtcactttctcagacttttcctaatccctaatctttcttaggcccccctgaagtatgctcccatggtacccaatattttcaacatgtcagactgttttgcaatggcttactttcttgcctgtattctttacaaaactggaagcttaacatgggtatctcatctctgctttgcagcatttagcatgatgctgtcacagagtaggtgctcaacaaatatttcttgaataatgaatgatgagtttgataataaatgaaaaagaatcactatagttgaatattttgcacaccattatctgattcttataaatatagatctctatgttgctttgtgaccaatgacatttgtgttgtgaacacctgcattccttaacagggtattggaactgatgagtttactctgaaccgaataatggtgtccagatcagaaattgaccttttggacattcgaacagagttcaagaagcattatggctattccctatattcagcaattaaagtaagtctacttttaaaaatagcaaaacatattttgcccttctctacccatctccttactcttatatgccttaaaatataaagatatttgacttagatttctctctccttgtcaatgtataaatgtgttgtctgagcttaaaatagtagcagcaaaatatcccttattttcagctctaaaatcccaggcatataatagacactcaatatttttttaggtgtactagccactaatttttcttcttttgtgaattacatatgcaagttgtttacctgttttttatattgcactgtttttatttatttcagtctttatgacaatgtaagaaaagaaaaatacgtattttaaatttcctctctgttttacatgagacagcatggttctgcagcttagagtgcttttcatttcagtatataggaaactttctcattttatttaacagctgtatatcattccattgtttgtatatttgtacccaccacaacaaacagaggcttccagtttattgctattgcaaacaatgttgtataatgcatacacaacttcatcaggtacgagtgtatctttgggatgaattctcagaagtaggatttctgagacagatataaatgcattttaaattttgacaaatattactaattgaattccattttgcaattccatgaggaatgtatgagaacttctttctccatagctttggcacagagggtattttcaaacttttaggtttttaaaacattttttagagatggggtcttgctgtgttgcccaggctgaagtgctgtggctgttcacaggtgcgatcataatacattgtagcctagaactcctgggctcgagcagtcctcttgccttagcctccaagtagctgggactataggtaaacttttgggttttcataatctgataggtgaggaattgtatctcagtgtagttgtaatatacatttttcttagtataagtaaggctgaatatattttcatgtttgaaataacatttgtatttctctttctgtgatctgtctttttacattctttgtccacattcttttgggtttttgttctttttggtcagtttctaagacgtttttcacataaggtagattagccttttgtctggtcatattttcccagtccgttctttgtcctttgacttggccaaaagtatttttttccaagcagaggttgcacatcttatttaattaaatttatcaatctttcacagtattttagtttttaaaaaatctggtcccttctgtttctttcattctggatgagaatcttcctaaaatgggctccttcctttctcttttaaagcatgaaacccattttcattgttttcagatctcagttgatatattatacatagaaacttcaaataaattacaaattatttgaattaatagggcagtaagcctgacaaaaattgtacaagaggcttctgtaccttaagctcgtggttcaaaagtcatagtcccaacaggaagatggcaactagttagtggagaactaaggggctagccccacacctgctcagtagccttccattgatttacttttctaccttgatgctccagaccacatatgaaagtctctagtaaatgagtgatagagagtgttagtccaagctggttccctggaacaaagtggaagctggggttggtgagtggagcaatccactgtccttgcctccaaggccacactgaccaggggaaaagacagagtcagggctgccttcgcagaggacttgcaggctatgcagacctctccgtctctttgctactccatctacccttgaatgtctcgaggaaatcagcactagagagtattggacccaggtgaactctccaaggtctaagctgagacttggggcctagaaggtgatccaggatgaagagggaagcagcagccaagcagagtgtttgctctgagtgctgagggtctaaaactgggaatggagtccatgctgattagaccccctaagctgtggatcattatgcaccatgcacatcctgatcctgggtagcagcaccctctctcaagcccctacaaggctggagcactacctctgtgggggagcttacactcagcgatgtcccctggggacacctggcttagaccacattccagtgtccctgccagcagctggagtctttggtccaaccttcgctatggccctacccacaatagccacccttgaacaggcacaaatattagcctgggtctttctgcagctatcttgggaaggtttctgcctctgactttacaaatggcctttgaatgaatgaatgaatgaatgaacatcaatcagtcaactagattcattcactaaaatctctctctctctctttttaatcagagtttttgtttttgcactaaacttttacagaaagagatgctgagatgcatgcataagttgaaatcaggaacttactcaaaaaggcaattctcagactgtgcctgggacttagcacaaattgcatcaactgctcacactcaattctatttgaatcagtcctgacacatcacaatagtttcaatcatcagaggaagattcaataacattaaccatgttgtagctactaaggcagaaaaatagactcacacattttctaaagattgtcagtaacaaggttgagacataaagagggctttcagttcaccctcagcaaaccagaaaattaaattaaccagtggctctccgttccccagtggtctgggtaattgaggcttattgtattagaaaacatttaaactatttgtagtttgatagaaaagaaaaatccatcactgaaaacttcagtttgcagtttgaaatagtacaagatttctttatttctaccacctaacacatattattaagtaatctcattacatttttgctattgaagaacaggatctttttagatggttgtttctgaaattcatgggatagagttccattttgcatatcatctcagcctgtcatcctgcctgttttcttccttccacctattgtttagacatttctttgtccattgacacctttctcagggggtaaccggtgggaaggagaaggcaaggaagaacagaggtgaaaaaccaatgtgtacctcttactactttataagaagatattatggaaaatttagatgaaattatattttttggtagttttccttcatagacaaattctgtatttatttaataaatagcacaattccaagctttttatgggaaaatatagtagccactcacaatcaactcataatctatgtggagacttgaggtaggtatgaagaaacaattagaagataataattgaaacaacagacaattaaatactagattgttgaatatagagctagtactatcggaattgagaagaaaagaagtttggggttagagaaatgggtcttgagcctgcctttcaggtcaacaagcatgtgttgagtgtctcctgtgggccaggtgctctgctggagcatttacctttaagaccccagatcaatagggtcttaaaagtaaatgctctagagacagatatgggaagaagcaagagggaaagaagtaataaggcatttgtttgattagagggtctaccttggggaatattgagaaataaaatccaagtagcaagatgagttcagttgaaagagagctttgagatcagcgaattcactcattcaattaaaaatattatcaaatgcatattatgtgctaggctcagggttacaattataagcaaagggggtagggtgggggaagacattttctgcccttatggaattacaactatgttaaatgtaaaggaaagtgacattgtgctaaaagatcctacaatagtaggacttgacttagaggaaaggcttctatgagaaagtcatgattcagatctggaaaataagtagatattaataaggcaaaatgtatggaggtaagggagccagtagaacattctaataaaagaaatgacaaatggaaaggcctcatggtggaggaagcataatgaaaaatgaggatgtgggggccagatcatgcaggacctttttggcaatgtttaaggaattttggctttagcttaagagtaaggggaagccattgaagagttctgggcatgagctcttgaagagttagtatcaggatcatgaaaagatccctgtaagatcttcttattctggagaataagaagggctcaaaagatatttaggagttgaaacttaagggacttggtataatatcttggtgtgaggaaaggaagatagcaaggatgacactcaagttcctaacttggaaaacagacagtggcgccattccttgcaagaggatcaggttttaggttgtttgtttgtttgtttgtttccttttcttttgggggagtggggggaggtttatgagtttggttttacatgtattgagtttgagatgtctttgagccatgtaagacatgtggagaggtcaagtaagtcattagcggtgtaaatatactttgagttacttggatgtattttcttgactaactggtagaacgcctaattgtttacaactctgatcagagatgtctagaaggagctcttttaatacaaagctggagcattgttgacttgtcagctctgctattgcagagcaagacaggaaaaccaatagcataagaactaaaatctatataaaaacgaagaatattgtcatatattttgtgaaacagacaaatgaacaagaaataaagaaaacagaaaaatatatataaaggcctattgtgtcttactatgaaagtaatgcttaacttcttcactaaatgagccttctctgagacttcctttatattaccactttctctaatattcaccccagtaacagccattccaaatgtgaaacttaagtgataagaagagctcactggttgggttacctcaaataaaataaaaataatgtgagcatcttacacaatccaggttgaaagccaagttttacctcctgtgaagtcttttgcgttacaaacttggtatctttgccctttaagcctcaacctcacgtagtatcttttctggacaacagtctatttttggttggccttgggaaaaggaactgataaacatattctttaaaaatgtggttcatttcactttcctaagttaggcagtgtagcagggtattaaggagccaggatatagggattcaaatcctgcttttgtcacttattctcgataagatttgaggcaagtttcctaacctgtctttctcattttacttatctgttaaatgggggatacgtatagtacctattgcagagagcttttaaaagggttaaagtagttaatacacattaagccttttgaatagcaagtgttcgataaatattattaaaactaaaatttgaagtttttatagaaatcaatattatgtaagtgatgcaatcttattttattaaaccaaaattgaaatttaactgcagtatatcaggaagaatctaaatattacttacagtgaagaagatgctggtcagaacgtaattacactcaggtatgaatgaatgatggaattgcaggtatgttttactaaatggtatagctcatgagtctcacacccaggtgaattccctagtgctataggatttgattcatttatggtctcccattatttatactgtatttgttcttcattgattttattctttgcagtcggatacttctggagactatgaaatcacactcttaaaaatctgtggtggagatgactgaaccaagaagataatctccaaaggtccacgatgggctttcccaacagctccaccttacttcttctcatactatttaagagaacaagcaaatataaacagcaacttgtgttcctaacaggaattttcattgttctataacaacaacaacaaaagcgattattattttagagcatctcatttataatgtagcagctcataaatgaaattgaaaatggtattaaagatctgcaactactatccaacttatatttctgctttcaaagttaagaatctttatagttctactccattaaatataaagcaagataataaaaattgttgcttttgttaaaa

SEQ ID NO: 63 - DNA, 183305 bp, Homo sapiens
  source 1..183305: mol_type = genomic DNA
gccggaagtgcccctcggggcggcgcggcgagggaccggggcctctcctgcaaccgccgttctgtcgccacggatgggaaggagtcgaccgcgagaagaggactgggggaagagggtctcagtgcagacagagttctggaaaagactgttgatatcacccgagccgcagggcaagctgggaaaggtagctcggcacagtccggctgctggactacaaatcccagcatactcctggaggagagggcgaggcggcagccgtgtggcctccacggcctcgaaggagatttgtggggtggcgcgtatgtggggactcggcaatttaaacacatcccgtgaagaaactgccaacaactaagttcccccccccccccccccgctgtatgttccacccttctggagccatcttatttgcggcctggcctcctggcacaagggattctggaggttgtggtttccgaacggatcgagactgacacctgaaggacgcggcttaaccgcttagcccctagcgggtcctgtgggtttcccgacgtctcctgggctgaaatggaagcgagaagtgatcgggaacattgtgctggcagttggatccggctgcaccgagcgccagccttgaaataagtaaaaccgatgcccttccgcccctaacctcaaaagctgcttttgcgtctcgatgttattgagagccggctctgcggtcagctctgagctaggcgctgtgagaacgctcagtaagacagtgtctcgtctggaaatgtacaggcgagattcaaaccgagaaactgccaaaggttgtgtgcagggcagatcctaggataccggagacccagcccgttggcttgacctcaaaactcgggggcttttcggcccatgctgtcccttaattcctcctcctttgctgacgctgtgggtgcgcatcaaagcctaaacttcactagctcccttgcacacaagaacactaaccctaacctgaccagttatttatttttcacttcaagattcttccattgatacttacgtttccctgataccgtccaagtgctgagggcggggatggactgtgtgatttgcatctgccaaatgcagaaaatttggaaggtcagttggtacacttttccgacctagatttcctgatggatgatgctgaagagtggcaagttgctgccaaaaacaaacaaaaaaacctaccatgatttattaatattatttttctaacccctgaatatgggttattgttcatctctgcccgctttccccactccctagtgcttgtctcagaatttttttttcagcgggtatttgagtagagaagggtgtcccagggaaaaaaatggttcttgctttctctaatctgaatattgagctgagctgtgactgggttaacagtagcgtttgttgttgctgctgctgcagcttgtttcaagtagtgccattgtaattaaactccgtgaagagatagcatcttttcttccggagagagtcagtgttgtcacctcagttcacgaattcatgtagccacctccagggtgaaatgcagcccctattccctcaaactaagcccacgaaggcatgttctctgcactttccttaaaaggccagatttttgtctgaggaagtttgaagcagatcttaaaatagatgagaaagctcatttggaattagactcattgacccccatttctctcagcacttatttgtcttgactgacttttttaaacaagctgtgctaggtcctaaaatcaatctgatgctatctcagtttttacctttctagacttctctggtaccagactagtccaggcttacacaaatctcaagtcttacttcagtgatacaaaaactcccaatatgcttaaggtagctaacatgcatttatttaacacccacgtgaatgctctgatcagaagctgagggaagaggtttaaaaaacaaaaaacatgactagattccttgccctccattccctcacagactaatagcaattataatgacaaatccacagtttttcatgctttacatatattaagtatataatgctcacaaccaccctatgaagtaaagtaccattattatactcattttataggtgggtaagtaaagcaaagagattagtgacttgcccaaagtcacacagtaaatagcaaagccaggattcaaacccaaacattttagtttcaaagcccagttcttacctggctatactaaactgtctacttagagagagcaaacattaactgattaaaagactcgtgaatagttagaaacccacgcacaagcagcataggaccaggagacaggaaacctcttgccacttcatagctgggatcctagaccacttgtgtcactgggcttattatctcagctataaaaccagagctcttacaactcttagtaattttttagttcctgagtacaaaataatgaacagatcagccactataatctcaaaactatcacactttctgtataatttgtcccatgctgctttgcattcctgttcaacttttaatgtatattgctgtctcaaccaaacacctcaaagccagagaaccatcttctacttatctccttgggcatccagtataatagtttacatagagtgtgttcttagcagtacttaaagtaaataatttactttaaatgtgacacaaaacagagctatctgattaaggtggaaagattgatttgaagtatcctagatgaattttgaactaggtgtggaagatgctatgggtaaatagtcaaagggagtgggaaaagaaagtgccatttactattgttacaatagtgatcatatgaccgatggaacagactctttgaggcaataagatgccaaattataaacaagacctaaggctgtgtcaggcaagggttaagtcacacatccctacacttgaagagtaaaccatcttctaactgccacaaggtttttctttttctctggtagctaaatagacactggcctggagataagcaatattgaatcaattgtagctcactgaccactagatgctgactaactgtatccccccaacccctgttccacaaaccataactatttctttgattggacaagagactgatttcagtaacatcctagtaagagactaccaaccacagactggttctggctggttttcagaggctgtgcactgagtgtcttcatgtcctttgcttcacctaattgtaatgcatttaaatgttaaatctccaccccaaagagaacataggacatatgtaacatgcatgtttgctcactatgcatgcatgtgctgccccccgctttgtgaataatcaaagctcctgtaacttaagtgtgtattcttagccaactcatttggcataaatttgtgttccactttttcctccctctaaatacctgctttcagtctctgccagagtctacacttcccagcctgtcaggatcaccagcctgcaggctgcaaccctttataaaaagtaaagctcccctctccaaatttataaaccttgggattcttcagttaacactatgtatcttccatatgccagttatggaatttaaaaaatatatatatattgttttattgttttatttttattttatttatttatttatttatttatttatttattttttgagacagagtctcactctgtagctcaagttgtagtgcagtggcgtgatctcgtctcactgcaacctctgcctcccaggctccagcgattcttgtgcctcagcctcccgagtagcggggactacaggtgtgtgccaccatgcctggctaattttttgtattttagtagagacagggtttcaccatgttgcccagggtggtcttgaactcctgagctcaggccatccacccaccttggcctcccaaaatgctgggattacaggcatgagccaccacgcccagccactttttaaaaaaaataattatataaaaaatagagatggggtcttgctttgttgcccaggctgacctcaaactcctggactcaggtgatcctcccacctcagcctcccaaagtgctgagattacagatgtgagccaccgtgcctgactgatattattttatttaatcttcatggttgcctacaaagtagacagtattatctattttatcaaagaaaatactgttacactattattcccaattttatagatgaacaatgaagattttgttagtagcagatgaacatgtatggtttgttaagtttgaaggaaatgatttgacctgtggtacacctaaatcatgttaccataaacccagtgtgctgtatctttgaggaaatcaaaggaaaggggaccaccattaattaaaatccttaactgagtcaagcactatgttgggtatttaatcataccatttaaccctcacaatacatctatgaagtgtgcattacttttattggtgtggaaacagaggctgagcaggattagagtctgtcaactatttctacaaaacatcttaaaaagggcagagccaagactgacctcaaaacccacatcattttcattacaccatatgggctttctatgttgccgtcttttagcgaagtggaacttgttagaaatgcaaattttggggccccatccagacctactgagtaagagggaggggcagaggcagcagtttctgttcacaaacctttcaggtaattctaatacacattcaagtttgagaaccactgtttagcagaagcgaacttgtaagaaccatgtcctttttaaaaaaatgacagttcttgcccaggcatgctggctcatgcccgtaatcccaacactttgggaggccgaggcaggtggatcacttgaggtcaggacttcaagaccagcctggccaacatggtgaaaccccgtctctattaaaaatacaaaaattagccgggcatggtggcatgcacctgtaataccagctcgggaggctgaggcatgagaatcactttaacccaggaggcggagcttgcagtgagccgagagtgcaccactgcactccatctggggagacagagtaagactcagtctcaaaaaaaaaaaaaaaaaaaaaagacgtttcttgatttttttaatttttaattttctttctttcttttctttttttttttttttgagatggagttttgctctgttacccaggctggagtgcaatggcacaatcttggctcaccgcaacctccgcctcccaggttcaagcgattctcctgcctcagccttcctgagtagcagggattacaggcatgtgccaccacgcctagctaattttgcatttttagtagagatggggtttctccatgttggtcaggctggtctcgagctctcaacctcaggtgatctgcccacctcagcctcccaaagtgctgggattacaggtgtgagccaccgcgcccagcctaattttctcttttaaactgagccttgtcttcttattttccagttgattttggttttggattttgtttaagaaagtaattatgtgctcattgaagaaagtagatagaagaaaataaaaatcagctataattctaccactcagcgataattgctattgacattttgatcaatttccttttagcatgtttccatatataagtaccttttttactatattagatcacattatatatttatattttatttttttcattccatagtttcctatttcattgtatattctctaaaaatattcttttagtagttgcttagtaatcagtgctttactgtcaaatgttttatttttaaatgttactttttatatgattagaatgaatattctcttgtattctcttgtgtgcttctttgattttctttcttttttttttttttttttttttttttaagacagtgtctcgccctaccgcccaggctggagtgcagtggcacaacctcagctcactgcagcctcgacctcctgggctcaagcaatcctctcaccttagccttctgagtagctggaactacaggctcacaccaccacgtctggctttttatttttttatttttttatttttgtagagacagggtttcaccatgttgccgaggctggtcttggactcctgaactcaagcaatccacccgcatcagcctcccaaactgctgggattaaaggtgtgagccactgtgcctggcctgatttttttttttttttttttttttttttttgagacggagtctcactctgtcttccatgccggagtgtaatggcacaatctcggctgactgcagccaccacctcccgggttcaagagattctcccacctcagcctcttgaatagctgggattacaagcacccgccatcatgcccggctaatttttgtattttttgtagacacagggtttcaccatgttggccaggctggtcttgaactcctgacctcaggtgatccactcacctcagcctcccaaagtgctgggattacaggcatgagccaccgtgcttggccccatgattttctttctaaggctacgttgttataaatggaataattaggtcaaaaggtatgaatgtttttacagctagagagccaaagtaccctccaggagattgatattgatttgttctccattcactgatccagtaaacaaatatttattaagcaccatgtgctagactttagaaagtttattacaataaacaaaatagttacactccttgccttcaaggagcttttggtggtttttgtatccttttttttttctttgagacagggtcttgctctgtcacccaggctggagtgcagtggcatgatcataacctgaggctttcaagggatccacccacctcagcttcctgtataactggtgcacagcaccacagccagctaattatttcttaattttttgtagagacagggtgtttctatgttgcctagtctgatcttgaactcctggcctcaagcaatcctcctccctcggcctcccaaaggcttgggattacaggcatagccactgtgcccagctagagcttttgatcttaaaagaaggcattaaatcctaagtatttccatacccttgccagcactgagtttgtgcagtttaaaaagaaatcgatttcattttgttaggtaggaatggtgttttttgttgtcattgtttaaattagtgaggctgaacaatttttcttgttcatttatttattcatcagttgtttattaagaatctgttatataccaaaacaatgctaggcactggaaatatgataaagaagatggacatgtgttttccttcacagagtttataatgtagtaattattggttgtgtatatttcttcatttctaaattgtatcctcttccatttttccattggagcatttatttttaagaattgatttgagagtgttcctttattcaatcagtatgtagtgaactaccatgtactaaacaatatggtgcaaaacaaacagatgaggaaaagaacaggtgaggatgttagccaggcatggttccatgtgcctagagtcctacccacttgggagaatgaggcgagaggattgcttcagcccaggaacttgaggttgcagtaaactatgatcacaccactgcactccaccctaggggacagagcaagacgtatttttgttttcttagagattttcattaccttgtctagtttcttttgattcttacttgccttactgccagctcttcctttttacctcaatctgtatacttcatatattacctgttttttagtatccatttgtcttgttgttgttgttgttgtttttgagacagagtctcgctctgtcgcccaggctggagtgcagtggcgcaatctcggctcactgcaagctccgcctcccgggttcacgccattctcctgcctcggcctccggagtagctgggactacaggctcccaccaccacgcccagctaattttttgtatttttagtagagacagcgtttcaccatgttagtcaagatggtctcaatctcctgacgtcgtgatccccccatctcggcctcccaaagtggtgggattacaggcgtgagccaccgcgcccggctttttttttttttttttggggggggggggcggggagacagagtctcactctgttgaccaggctggagtgcagtggcgtgatctcagctcattccagcctcaacttcctgggttcaagcaatcctgcctcagcctccaaaagtgctgggattacaggcgtaaacccccatattctcggcctttttattgaatttttattgcaaacataaagtagttttgttttttgttttttagatggagtctcactctatcacccaggctagagggcagtggcacaatctcagctccctgcaacctctgcctcccaggttcaacagattctcctgcctcagcctcccaagaagccgggactacaggcctatgcccagctaattttctgtatttttagtagagacagggttttgccatgttggcaagcctggcctcgaactcctcacctcaaatgatccactcgcctcagactctcaaagtgctgggattacaggcgtgagctaccacgcccagcctcttcctcatcttgagtgctgtgttttctttttatatgctgtagaatcttctcataaacctatgaggtggttgtaatttttttctgtttactcatccttagatgagcagtgttgctatgagtcaatctttttcttttaaagacttttaataggttgttgggagaagcttagggatctctagtcagatgacttcttaaattagaacttaagacttttcattttgaaaaccggttgtgctgactggaatgggcacattaaagaattgaactaaggctgggcgcggtggctcatacctgtaatcccagcactttgggaggctgaggcaggcagatcacgtgaggtcaggctttcgagaccagtctggccaacaaagcgaaaacccgtctctactaaaaatacaaaaattagtcaggcatggtggcaggtgcctgtaatcccagctactcaggaggctgaggcaggagaatcagttgaacccaggatgcggaggttgtggtgaacccagacagtgccactgcaccccagcctgggcgacagagcaagatttcgtcccccacaaaaaggaaagaatttagctaagacgtctttgttatacttgacataaaatatagagtggggttcctgaaatggtcagggaatattcctggcctaaccttagtgagacatgtattcttaagatctttctcccttagttcacagcctcttagttggatgcccctgtgtcacagaacacattttggctatggggtgtgatctgtgtctgaggaacaacaagaagctacacgtcatccacacaggagccaaatctggaactctggtctcagttcttcaggactatttgagcgaataatcactcaacactggagtaaaggatgttctactagaagtcttattctgactcctaaaaccacgctaccgaaagtgttgatccacaaaccagtgccagtgcttgaactttgttactggtccacagttaggtaagtacagaaatggagaataaatgtgaagtatgcgtaaatgatatatgatttacagtccaattgagatgcttcaggagtgaaagtggggacaatgaaaattatgctaggacaaaaatcattaactggactgtccaggtaaactggaacatatactcacctcatccttagatttcactagcagtagagtcctggggacacaggaaccaaatgccctcctgcatttctccattcctgagaggaaaataccctaattcctgaatcccagcctccacatacttcttaggatagcctagcaattacccctgggccccttgtgacaccatttcctaaaccagccctggaaactcacttatgattggacactatgtcttgccctcttgcctaagctgagaactcttaaaaatgactgtctttcccctagagggtattttggagggccaggcaccagtccttagccatgcctccttgtgaagttttaaaatatgatgcttggttccatatgaaatttaaagtagttttttctaattctgtgaagaaagccaatggaagcttgatggggataacattggatctatacattactttgggcagtatgaccattttcacaatattgattctttctatctatgagcatggaatgtttttccatttgtttgtgtcctctcttatttccttgagcaatggtttgtagttctccttgaagaggtccttcacatcccttataagttgtatacccaggtattttattctcttagtagcaattgtgaatgggagttcactcatgatttggctctctgtttgtctattattggtgtataggaatgcttgtgatttttgcacattgattttgtatcctgagactttgctgaagttgcttatcagcttaaggagattttgggctgagacaatggggttttctaaatatacaatcatgtcgtctgcaaacagagacaatttgacttcctctctttctatttgaatactctttatttctttctattgcctgattgccctggccagaacttccaatactatgttgaataggagcggtgagagagggcatccttgtcttgtgccggttttcaaagggaatgcttccagcttttgcccattcaatatgatattgggtgtgggtttgtcataaatggctcttattattttgagatacattccgtcaatacctagtttattgagagtttttagcatgaaggggtgttgaaatttattgaaggccctttctgcatgtattgagataatcatgtagtttttgtcattggttctgtttatgtgatggattatgtttattgacttgcatatgttgaaccagccttgcatcccagggatgaagctgacttgatcatggcagataagctttttgatatgctgctggattcggtttgccagtattttattgaggaattttggatagccaagacaatcctaagcaaaaagaacaaagctggaggcatcgcactacctggcttcaaactatactacaaggctacagtaaccaaaacagcatagtactggtaccaaaacagatatatagaccaatggaacagaacagaggcctcagaaataacaccacacatctacaaccatctgatctttgacaaacctgacaaaaacaagcaatggggaaaggattccctatttaataaatggcgatgggaaaactggctagccatatgcagaaaacagaaactggaccccttccttacaccttatacaaaaatgaactcaagatggattaaagacttaaatgtaagacctaaaaccataaaaaccctagaagaaaacctacgcaataccattcaggacagaggcctgggtaaagacttcatgactataacaccaaaagcaatggcaacaaaagccaaaattgacaaatgggatctaattaaactaaagagtttctgcacagcaaaagaaactgtcatcagagtgaacaggcaacctagagaatgggagaaaatttttgcaatctatccatctgaccaagggctaatacccagaatctgcaaggaactcaaacaaatttacaagaaaaaaacagacaacccaatcaaaaagtgagcaaaggatatgaacagatacttctcaaaagaagacatttatgtagccaaaaaacatatgaaaaaaagctcatcatcactggtcattagagaaatgtaaatcaaaaccacaatgagataccatctcatgccagttagaatggcgatcattaaaaagtcaggaaacaacagatgcaggagaggatgtggagaaagagcaacggttttacactgttggtgggagtgttaattagttctaccattgtggaagacagtgtggcgattccaaaaggatctagaaccagaaataccatttgacccagcaatcccattactgagtatatacccaaaggattgtaaatcattccactttaaagacacatgcacacatatgtttattgcggcactgttcacaatagcaaagacttggaaccaatccaaatgcccatcagtgatagactagataaagaaaatgtggcacatatacaccatggaatactgtgcagtcataaaaaagatgagttcatgtcctttgcaggaacatggatgaagctggaaaccatcattctcaaaactaacacaggaacagaaaaccaaacaccacatgttctcactcgtaagtgggagttgaacaatgagaacacatggacacagggaggggaacatcacacactggggcctgtcagtgggtagggagctaagggagggatagcgttagaagaaatacctaatgtagatgatgggttgatgggtccagcaaaccaccatggcatgtgtatacctatgtaacaaacctgcacgttatgcatatgtatcccagcacttaaagtataattaaaatatatatacgtatatatatatatatacacacacatatatatgtatatatgtatatatatacgtatatatatgtatatacgtatatatatgtatatacgtatatatatacatatatgtatatatatgtatatatgtatatatatgtatatatatgtgtatatatatgtgtatatatgtgtatatatatgtgtatatatgtgtatatatatgtgtatatatatgtatatatatgtatatatatatgtgtgtgtatatatatatatgatacttggtcataaccgctgaactactgaatacagtattgaccccagttcattagaaacttcagagtttagtgcttctctgcacatattttccaaatacagtagttcctttttttttttttttttttgagatggagtcttgctctatcccccaggatggagtttagcggcctgatttccgctcactgcaacctccacctcctgggttcaagctgttctccctaagcctcctgagtaactgagactacaggcatgcgccaccacacccaactaatttttgtatttttagtagagatggggtttcaccatgttggccaggctggtcttgtactcctgacctcaggtgatctgcctgcctcagtctcctcaagtgctgagattacaggtgtgagccactgggcctgctcattagttcttgctggtgtaacaggagggcagagattaggccacagtagaaatctacagcctttcagctggaaacaactgtgaaatatcatacactgtgagctattatagtggctttacaatgtttttactgatataatcactatattcattttttttttttttttgaggtggagtctctctgtcaccaaggctggagtacagtggcgcaatctcagcacactgcaacctccacctcctgggttcaagcaattctcctggctcagcctcccgagtagctggcattacaggcacccgccaccatgcccagctaatttttgtatttttagtagaaacggagtttcactgttttggccaggctggtctcaaactcctgaccttgtgatccacccacctcgacctcccaaagtgctaggatttacaagcatgagccaccgtgcccagcacactacattaatttttaacaccttgtactcgctcatatattttaaagttgacatatagaaattttcatcacaactctaaataattacaaaggatatttctggcatcttataaatactgatattataaaataaaacttacattactatttttaatgtacgcaatggagactaaataccacatattcgatggactatattcaccatcatcctacttattctccaacagttagaaatttcacattattgctttttcttctagaacatatatttttgcctccccaaatattttattctaaagtaataattttatgctgggaattcatttattgattttatattataattctctacaacaacatatggatatacatgtaaatttaagcttttaacttcctgtgagtataagtctctaagtgttaaaatttttcttctggattgatttatgctacttattaactttatacaattgattagaacagtatatgtataatacaaattttgataaacacaaaaaataaaaatatattggaaatgcatttattcacaagatgaatggggatttaaaaatttttgttcactaattctatcaattccatgcctatttaaaaattttttatagatataagcattggggaaacttgttcaatatataagtggatgaggcttgaagaagttccctttaatactattacttttttctttgcactcctgaaatatacgcaaaaatactcaaaggttttattctcaaaaattattcttaataatgtatcaactttaacttgaacgatcctctttaaattctgtcaaaagcaaaaaaaaataggcggggcacagtggcacacacctgtaatcccagcactttgaaaggctgaggcaggaggatcacttgagcctgggagttagagaccagcctggccaacatggcaaaaccctgtctctattaaaaatacaaaaaaattagcttggcgtggtggcacactcccgtaatcccagctacttgggaggctgaggcaggagaattgcttgagcctgggaggcagaggctgcagtgagctgagatcaccccactgcactccagcctcggtgacagagcaaggttctgtctcaaaaaaaaaaaaaaaaaagcaaacaatagaagccgctccttgcagacatttattccccagctgttgaggctgttcataccctcaccttctaggaaagatatcaaaacagtttcacgaagatttaacaaatgactgctattatttctcttagaggtaccttgtttaacccagtattctcagggagagttcagaaaatagaaataatgttcatttcaaagcaccttttcaatacaatatttcttggtaaaatgctgttcttataatgtgatttaaatttatttttatttatttattcatttgtttacttttttttgagactgagtctcgctctgtcgcccaggctggagtgcagtggcaccatctcagctcactgcaacctccgcctccctggttcaagcgattctcctgcctcagcctcctgagtagctgggattacaggtgcgcagcaccacacctggctaattttttttgtaattttagtagagacggggtttcaccatgttggtcaggctggtctcgaactcctgacctcatgatccacccgccgtaggctcccaaagtgctgggattacaggcgtgagccactatgcctggccactttaaatttatttttgtcaaacctgaggagatgcaggttttgctcatttaatttatgaaaatgtatctagttagtaaagtcagtcctatttgtgaaacaaacgaggtaaatcagagttactttgtgaaaaaaagtctaacttcttttttgtctaagctcattttcaatacaaatatgtgttcatatatgtttcaagaaagattataaaccattgggaaataaattagagatagcatctagaaacattagtaaagacaagacgaaagttagactgctctagtgtaattggcttctccactttatgttataaaccaagatgaaaagaatatgctatttattacttattttgaaacaatgcactaaaatgtgtcactaaagttacaagtaagtcattaagtgagcagtatgattaaaggcattgtatgcttctcttatttatttgtttattatctcttcttttagagagaagggtctcattctgttgcctaggctggagtgcagtggtgtgatcaatagctcactgcaaccttgaacttctgggctcaagtgatgcttttgttactatgtatggcatgtgtcaaatacaagtatttggctttcagaatagttaagtaagaatcatgtataaaaatcagcaatagagcagggcatggtggctcacgcctgtaatcctagctctttgggaggctgtagcaggaggattgcttgaggccaggagcttgagaccagtctgggcaacatgatgagactttaaatgtagagctttcgtgcttgcaagaaagaaatgtgagtttgcaggtgacagaaaggaagcaggtcttgaaatcagagggaaaagattccagctaccattgcaattgctggtggcagtgggggctggggagaaaatgtcataagtcaagaacttggattttaaggcatacctaggaatgaagcaccttagtcctgggcctggtacagacagataatcctgtgtgaagctggaactctcaaagagtggcaccctcagtgaaaggacacatagcaaaaaatctactcaccagcccagagaggtgacaagaaaatacatattttcttgtctatctgtgtgtatgcatgtatgcacatatgtatgtatgtatgtatttcttgtctgtctttatatatgcagaagaaagagttagaaaaaagaatttctgcagagtcattaaaaacccagacctgcttttcacattgcttttgactttgcttaatactctctttgtggtcaagaaacacttaaattaagaagttaacataaaaattgattctgggccaatggtaaaccctagaggcacttacaggagcaaacgtaaaatcactctggatactccttcaaccaaggtcacatgaaggtctcatagactaaaacaaatcaatgtaaaacagagttcatagaaaaacagcgtaaaacacaagaaaaaaatcacccataagctcagttaagagaacaaaacaagagcactggagccttaaaatcctgaaacattagactaacattctaaaaggtgatgtaaaataagtattgtttaaaataattacaaatgaaataagaaatcaaaaccctatgattaggaaaaagagtgtatgaagaaacaacagataaatctagagaactaccaaagggaaattttagaaatgaaagacataatcaccaaaatttaaagcaaatggttaaatagcagataagacacaattaaagagaaagaaccaattaactagaagttaaagctgaggctatttgccagaagggagggagggagagagagagagagagagagagaatatgagtgaaaagttgagatatggaagataggaacatactcaaaatagaagggagagataagagagataatagaagggagggggaagatgacaatggctgagaatgtccaggactgaaaaaagatgtaactcttcagattccagaagcataagtcctaaaagcatagagaaaagcaaatccacatatagctacatttactgacaaagacatacagacggacttaagaactcaaagagaggaaatatagattactcacaagaaaacagcaattagacagaagacttctcatgacaacaatacaggccagaaacaaaggattaatatcttcaaagtgggtaggaaaatataaaaataaatctagaattctgtacccagttaagcatacttgaagcataagatgaaataaaggaagcttcagacaaaaaaaaaaaaaaaagctgagaaaatttaaactcatagacctttcctaaaggagctactaaaatttgtatttcagaaagaagaaaatcaaactcaggaagaaatgcaatgcaagaaactattattaaatgaaaaagagtaattaggcacagtggctcattcctgtaatctcagcactttgggaggctgaggaaggaggattgcttgagcccaggagttcaagaccaccctgtgcaagatgatgagaccccagatctaccgaaaaaaaaaatgcagtgagctgtgattacagtgagctatgatcttgtcactgcactccagcctgggtgacagagtaagtcccgatctcaaaatttttttaaatctcacaaggacaagggaagaagagagaaaaaataataagagtttggaacctggaaagcacgtggacaggtgataactgacttagcagacctgagaaagctgactttcaaaccagtagtagggaaaaccaagaagcaacatgacagtaggatttctcggggtaagagagttttttttgcactggatacgtctgaaagtgggtgtgtaggtgagactaaacccaggacgatttcttgtaagtctgtacaagaagcagtcagcatccccaatactgcacagcggccactgtccctcttccacgagggtggatgattggaagcatgttctctgaagaatcatgcagtggctctctggaatggggacaccagatgtagtcgaggtgttctggctatctaaggttgcctaaaaaaccaccccaacacttgaaggttacataaaacagtgaccattatatctcatgattttgtgggtctgaatttgaactgagcaattcttctgtcccacctggcatcaagaaaggtcacttggtgttatccagctggcagatggaccagtctggagaactcacatattgggtaccatgataagaagagctggaaggttggtctcaactggcactgtaaactagagcatctacacatgccccttcacatggcaggctcagggtcagatttccttcatggaggctcagggtttccagaaaggatactccaagacatccaggcagaagttacaagccttcctatgcacgcttggaagctgttgaacattatttctgttgcattctataaatcatgccagtcactagggccagtctagatttaagggaaggggattaggctccatccctgagtggggaggggtgggagggtgcaaagaatttgcagccatctttcatcaaggccatgagattaacacaagactagggctactgtactgaaattgaagagccatatgaaacttaagatgatgtctactgagctgcttggtattcttcctgcttggctcctagaactctggcagccaggttcaaactcaccaggatggagaatttggaatacttttctttggggactctaagaggaaagacctgaagagatgtaatcatttatgcaatgaaactggagcaacctgttggtaaactcacccttgtcaagccccacccacttacacacgcactcagggcttccaggcagctttgtagacctcactcttagggttgcgagataaaatacaggacacttagttaaatttgattttcagttaaacagtaaataattttttactaaaatataaaatactcatgtactataagtatgtcctaaatactgcatgagacatacatgtactaaaaattgttgtttatctaaaattcaaatttaaccagatgtcctggtttttctttttcttttttttttttttttttgagatggagtctccctctgtcacccaggctggagtgcagtcgcatgatctccactcactgcaagctccgcctcccaggttcacgccattctcctgcctcagcctcttgagtagctgggactacaggcgcccaccaccacgcccagctatttttttttgtatttttagtagagacggggtttcaccatgttagccaggatggtctcgatctcctgacctcatgatcctcccgtctcggcctcccaaagtgctgggattacaggcgtgagccaatgcacccggccttttttttttttttttttttttttttttttttttgctaaatatagcacacttacataagagcagagccaaaggtcatcacaatataagggaaggatctgacaataaagatagaatccaaaacacgctaacagagaaaatgaaatgaggaagaaaaagactatggggagaagaaaactttgagaaatctactattgagcttctctgagaaagatcagaaatgctgggcatggtgacacaagactgtagtccctgcttctccacaggctaaggtaggaggattgcttgagcccagtttgaggttgtagtgtgctattatcatgcctgtgaacagccactgcactctagcctgggtgacatagagagaccctgtgtcaataaaaaaagaatactctaaaaaatgaacactcagagaaccaaatggagttcttttaaattaaaaatctgatagcaaaaatgaaaaactcagtagaatgttaagaagataaagttagaaattatcctagaatgcataggcaaaaggcaaagagaagggaaagaaataagaaaggttaagattagaaagccagccctggacatctgggaaacaggggaagaaatgaattaaataattcaattatatattttgagaactaaagagcatgaatttccacattgaaagtgctgagtacagtgcaatggacaaaaccagaaccacaccagggcacgttgtgatatggaagactgaggacatagagaagatcttacaagtgcctaggaggaaatgaagtttcacttaaagaatccagaatgagaatggcatctgatttctcagtagcaacacatgaaactgaaagacaatggaataatgtctttaaaatctgagggaaaataacttccaacatagattctcatacccatccaaatgtagtagtaaagcgtgggggtaaatgtatttcagacacgtacaatttcaaaatatttatcttccatgtaccttttttcaagaagctttcagaaggtgaaagcttttccaccaaaataaggacataaatcaagaaagcttttgtgtgtgtgtttttttaaatgaatagcaaaatgaacaactaaaaattgaatggtggggaagggtaataagctaacactatagttacagctttctaaagtactttctagagtacacctaacatttacttactatgtgcacttactatgtgccagtcattattctaggtgattcacatcaatggtatcaatcagttaatcttcacaacagctatatcagttacattcttgcatagaataggtgtcagtaagtattactattgacggtatacaattgttattaattcaacaagtcacattaaacttcctgcagcagactgtatttttcaaaattggcagcaacagtatgttcaatcccatgtgctcttccaaaaaccctaccccctacctcaatcaagagatggcatctatgtcctttccccttgaacccaggtaggcttctcggacgggtttctgtgactgcacctctaaagtaatgctatgttggccaggcgcagtggcttatgcctgtaatcccagcactttgggaggctgaggcaggcagatcacttgaggtcaggagttcgagaccagcccggccaacacggcaaaaccccgtgtctactaaaaatacaaaaattagctgagtgtcatggtatgcacctgtaatcccagctactcaggaggctgaggcaggagaatcacttgaccctgggaggtggaggttgcaatgagctgagatcgcgccactgcattctagcctgggtgacagagcaaaactctgtttcaaaataaacaaaaataaataaagtactgctatgtgactttcaaaaccgcatcttgaaaggtagtacagcttccatctagctctcttgctcgtaatatgtgcctttggagcatataagtacatgaaaccaccgtgcggcagagatcacgtgaacagaccacgttaaaatagagtccgaggaaccctggctgttgaagcccgcagcggtttgagttttccctgtcccagtgccagacatgtgaatgattctgaggccctcaagatgactccagcattatccctgtctcatggcagccaggcaacacactctgagtggtaccacctagctgagtccagtcactcaccagaatcatgagagataacaacaataaatgattgtttcaatcatctgcctgggcgacagagtgagactccaccccagaattgtgggtgttatttttttggagcaatagacaagcagaacatttccagataaaagtgagttttagcctagacttctgaatctcctatccctatactcatttaaatagcccaaggcatgtaaagaggggaatttttatccttagtggcaagtctcctttctgatactgtagctgaatccaaagcttgtagacacaagtgataaaaaaacagattaattagatttcatcaaaattaagaactcttcaaaacacacttaagaaaacaaaaagacaacccacagaatgggggaaagcatgtgcaagcatatgtctgataaggtacttgtactcagaatagataaagaactcttacaactcagcaataaaaagcaacaaataacctaatttaaaatgcacaagggccaggcatggtggctcacacctataatcccagcactttgggagcctgaggcaggcggatcacaatgtcaggagttcaagaccagcctgggcaatatggtgaaaccctgtctctacaaaaaatacaaaaaaatagcggggcgtggtggtgggcacctgtggtctcagctacttgggaggctgaggcaggagaatcacttgaacctgggaggcagaggttgcagtgagccaagatcacaccattgcactccagtgtgggctgaataggtatttctgcaaagaaggtacacacatggccaataaacacatgaaaaggtgctaaacatcattgattattagggaaatgcataccaaaaccacaatgagatactactttacagccattggggtagctgtaattgaaaaaacagacaataacaagtgttgacaaagatgtggagaagctggaactttcatacaatgctggtagaaatgtaaaatgtgcaactggtggaaaacagtttgctagtttctcaaaaggttaaacagtatcaccatatgacacaggaattccagtcatagtgatatacccaagaggaataaaagcatatgtatgcaaaaaaacttatacacaaatgttcatagcagcattattcatagtagccgaaaagtggaaacaaccaaaatgtccagtaactgatgaatggataaacaaaatatggaatattcatacaatgcaatattattctacaatgaaaaagaattaagtactgatacatactacaacatggatgaatctttaaagcattatgctaagtgaaagaagccagtaacaaaggaccacatataatataaaatatcaggctgggtgtggtggctcatgcctgtaatcccagcactttgggaggccaaggtgggaggatcacttgaggccaggagtttgagaccagcctggccaacatggcaaaatcctgcctctactaaaaatacaaaaattagctaagcgtgttggtgcacacctgtagttccagctactcaggaggctgaggcacaagaatcacttgaacctgggaggtggaagttgcagtgagctgagatcacatcactgcacttcagcctggccgatagagtgagactccatctcaaaataaaataaaataataaaataaaatgaaataaaataaaataaaataaaatagtaaaataagcaactctatggagatagaaattagattagtggttgcctaaagctgaggaggcagagagggtgggaaggaaatgaaagagactgctaatgggtacagcatttctttttgaagtgatacaagtgttccaaaattgattgtggtgatggttgcacaactctgtgaatatacaaaaaactattgaattgtacacttcacacaggtaaactggcacgtgaatacctcgacaaagctattgaaaaaaagaaagagatccttttgtagttcatgggcataatgattggtattcacgcacatgtgtgagatgtgccacactcaaaccttgttatgacctcggcacattacccatctgacctgaaaaaaaaaaaaaggaaagaaaaataaaagtcccataaaagtgttatagactgattcagtccgatgtacaaaatactctggcctatctgtagagaactggacaggatatcctgtgatgtgatgtatggggatgctgtggcaacatttatgtcagttcttctctctcttttttgtctcttttgtccttttcttctcctctccacatagcatgtgatctattctttattatcagttatctattgacccaacaatgtgggtaacaaagcacctgaagactcatttttattgctcccaaggccatggcagctgagccattcttcctgcttagatgggacttgctgctgcacccggaatcagcagttgatcttggctgggctctcttgtgtattgggggttgactggaatttgtgggactaggatggtctctgcttttctccatgtgtctttgcattcctccattgggctagccgggacaagccgtcatgctgaggcagagatgcactagtgagcatgcagaaatgcacaggtgcttttcaagtccctgctcgtctcatgtctgataacattccattggcctaagtatgttaccagaggaatgttcagtaacaggaggaagggacaataaaattacaaggcaaagagtgtggagccgggtagcctttaattggggccattaatactatgcatggaccggtttataagtccatgcttatctgttttataaactctaggttgtttactaaagattatgaattcagtcatttcccctccaagtgaaatttttttctatttttatttgttattacagaagtataaggaatgagtcagagaacatagacaagctaaatgaagacaaagaagtatgatatacggcatggtggctcatgcctgtaatcccagcactttaggaggctgaggtgggaggattgcttgagcccaggagttaagaccagcctggggcaacatagtgagaccctgtctctacaaaaaatttttttaaaaaaagtatgaattgtccctttcctagagacaatcactcttgagatacagtcttccaggtatttctctctacatttgtgtataggtaaatatacacatatatatctttctcattatatatgtatagacacatacatgtatgtgtataataaaaaatattaatttagaaccgtcatttcatcttgatgaagttaggtttcactgagtgatatgtaaaactcaccttctgcatgtggaaattcattgtcttcaggcacagccatattacgctgtgtataactcctgtctgtggaatgagacactttggcttctgcagcaggcttgccttctggtattcacgtggtcagtaatattaccacatgtcccacaagatggtaaacgctgacacacaaatgttatatagtcatcatgtattttcttgagaaattaaaattatttatttaaacatatactttatttccattccttttgagcctttttttttttttcttgaaggcagagtctcgctctatcacccaggctgcagtgcagtggtgcgatctcgcctcactgcaacctccgcctctcaggttcaagtgattctcctgcctcagcctcccgagtagctgggattacaggtgtgtgccaccacgccggctaatctggctaatttttgtatttttagtagagatggggtttcaccattttggccaggctggtctcaaactcctgacctcaggtgatccacccgcctcggcctcccaaagcactgggattacaggcctaagccactgcgcctggccttctttgagcccatttttgtcaaacaatttattaccagtataagggtgtaaccaaacaaatttttgtttataaagaatcataaggccgggcgcagtggctcacgcctgcaatcccaacactttgggaggcagaggtgggcagatcactggaggtcaggagtttgagaccagcctggccaacatgatgaatccttgtctctactaaaaatacaaaaaattagccaggcatggtagtacacacctgtaatcccagctacttgggaagctgaggcaggagaattgcttgaacccaggcggcagaggttgcaatgagccgagatcgcgccactgcactctagcctgggcgacagagtgagactccatctcaaaaaaaaaaaagaatcatagattttaccatacaataaataccaaaaccactgtaacaagagtgtccatgtaccttctatattctttattgcaggactgttcagcctttatttcctgcacatagtttatataatctaatctagaatttctcatgtttcccactgactctgttgcctggctggcctcatcctactgtcttgtataccaaatagttatcaggagcaggcacatctaatacttctcccaccgctactcaagattgtaaagacttcaccttccttgccttattttactgataagtgcccagcagactgcccttgaaagagacttaatagttatcttgcctctgggaagagttggggggaaaagtactgatcattactagtgatattccacttttaaccttgtgtcacaaacctgtgtttgctgcacacgtgtcttatacactagagacagggtaggaactgaagcacaaagtgaaagtttaccaaaatcattccagcatattataaagcaactatgaatatgtggctaaaaaatgacaaatggccaggcacggtggctcatgcctgtaatcccagcattttgggaagtcgaagcaggtggatcactagaagtcaagagatcaagaccatcctggccaacatggtgaaaccccatctctactaaaaacacataaattagctgggtgtagtggcacacacttctagtcccagctacttgggaggctgaggcaggagaattgcttgaacctgggaggtggaggttgcagtgagctgagatcgcaccactgcactccagcctggcgacagagcgagactcaatctcaaaaaaaaaaaaaaaaaaaaagacaaatgagacaaatgctaaaatagagatggcgactggtccacagtaaacttgaagcaaggtcaccctaattataaagctatagtaactaagacaatgtggcatgggcacagggatagacaactggcagaatagagagaccagaaattgacctatggataaatggagacctgatagatgacatatacatggggaagagtaaatagtactggaaaatttggttatctacggaaaaaatgaaagtggacccttaccttacatcaatcataaaaatcaattcagggtcaggcgtgatggctcacacctgtaatcccagcactctaggaggttgaaacagggcagactgcttgagctaaggagtttgagaccagcctgagcaacatagtgagacccctgtctctgccaaaaatacaaaatttagccaggcatgatggtgcacaccagtaggctcagctactcaggaagctgaggtgggaggatcacttgagcccaggaggtcaaggctgcagtgagccaagatcacaccactgcactccagcatgggtgacagagtcagactccatctcaaaaaaaaaaaaaaaaaaaaaaaagaagggaataccatcaataatcaattcagaatggacctaaaatgtgaagagcaaatgttttaaatatttagataatagaatgagtagaatagctttatgactttggggtggagaaggattccttaaataaaacacaaaaagcacaaacctttaaaaaatgataaatttgagactacattaaaatcaataacttttgtttataaaaataccataaaatgcataaaatgacaggctaaaactcaatcaaaatatctgcaactctagtaacagtaaagtttagcatcctgaatatgtaaagaactcctgtgaatcaataagaaacaacacaagagaaaaagcaatgcaaaaaagacctgtcaagacattttacagaataaaaaatatgaattgggcatggtggctcatgcccataatcccagcactttgggaggccaaggctggtggatcatctgaggtcaggagttctagactaccctggccaacatggtgaaaccctgtctctactaaaaatacaaaaatacaaattaaccaggtgtagtggcgcatgcctgtaatttcagctactcggggggctgaaacaggagaattgcttgaacttgggaggcaaaggttgcagtaagctgagattgcgccactgcactcctgcctgggcgatataatgagactccatctcaaaaaatatatatatatacacacatatgaattgtgaataagtacacaaaaaagatgcttgacctcattcatagtcagggaaatgcaacaccaatccttggtaaggcatgctatcactgctaaagagtcagaaaccaacaagtgttgataagatgtggagcaactagaactctcattcactgcaactgagagtataaactgtacaactaatttgcaaaacagtttgatattttattaaaagtgcaaaaaccttatgactcagtgattcaattctcacatgtttacatcctagaaaaactcttgaggatgggtagcaggagacatgtgggaaatgatcttaaaacattgtttttatagcaaacaaacaaatataattggaagcaacccattatttatagattggagataaattgtgggatattcatgaaccacagttacatgatcaacatggttgaatataaaacactactgagtgaaaaaaattatgtactttattatgtattttatttatttatttatttatttattgagacagaatgtcgctctgtcacccaggctgaagtacagtggtgtgatctcggctcagtgcaacctctgcctcttgggttaaagtggttctcctgcctcagcctcctgggtagctgggtttacagttatgtgccaccacacccaactaatttttgtatttttagtagagatggggttttgccatgttggccaggctggtcttgaactcctgacctcaagtgatctgcctgccctggccccccaaagtgctggaattacaggtgtgagccaccacagccagcctattatgtattttaaacaatattatgtatctaataaatacattatagtataattttgtttatataaattataccttttaaaaacagcaaaaccaaacaatatttttgtggatacctacatgtgtagaaatagcataaaaacatgctagtaaatgccaaagaagatattcagaatgatgactatgcatggggagagagggaagtaaatgggtttggggagaggttcataaacagtttcaacagtgttaatcactttgtttttttaaagacctgaaacaattaagggaacacactaatattttatgacgctggtagtggctttatggaaagtcaatattttttttctctatatagtcaattagtatacataacatataaaaaaaaaagctcatcgtcactggtattagagaaatgcaaatcaaaaccacaatgagataccatctcacaccagttagaatggcgatcattaaaaagtcggggaacaacagatgctggagaggatgtggagaaataagaacacttttacactgttggtgggagcataaattagttcaaccattgtggaagacagtgtggcaattcctcaaggatccagaacgaaaaataccatttgacccagcaatcccatatacccgaaggattataaatcattctactataaagacacatgcacaggtatgtttagtgcagcactgttcacaatagcaaagacttggaaccaacccaaatgcccatcaatgatggactggataaacaaaatgtggcacatatacaccatggaatactatgcagccataaaaaaggatgagttcatgtcctttacagggacatggatgaagctggaccatcattctcagcaaactaacatgagaacagaaaaccaaacactgcatgttctcactcacaaatgggagttgaacaatgagaacacatggacacaaggaggggaacatcacacgctggggttgggggttggggattggggggctaggggatggatagcattaggagaaatacccaatgtagatgacgggttgatgggcacagcaaaccaccatggcatgtgtatacctatctaacaaacctgcacgttctgcacatgtaccccagaacttaaagtatattaaaaaaaaagaaaagaaacatttttttcaaagacacacacacacacacacacacacacacacacacacacacaaagtgaaggagaaaagtgctgacctgcagccaccctcagtgggagctgacttctgcaccaactccctctctcactcagtggccctagcccagtgccaaacaggactgtgggctgggagaatccccctgggattctgcctccctgcagactaaggcacctggggagatatgaggctggactgaatctgtcccattttgatgttccttaccctacacgaggctttggggtgaaggggatagggagagtgggtcccgtcacacattcccccagctggctgcccactgtgcttcttacctgcggccaccctgcgtgcctcggtgaacactgtctggtgcaaaggaggtatacgaaatgtgtttgttgaattgatccaagccattatcagcacttcagtgggctgggaggacatgaaaatagctgcatggtgaagtggtgtttgctggtgcctgtcctgtcccctgcctctgccagctctctcatgacattccttaggcaacctggcccgtttgcaggaagctgacagcaggtattcagaaattttaggatttgggcttaatttcagataagcaggacaacctgggctctcccacaatgaaaaatagattctgctgtttttttcctgcctttttaacatttcaagccaagttcctatgcccatccacccatataaaacttccttgttcagaaagtcatctgcgcaactggcaaaggcaccagctcagagttttctatttttattcctgtgtgtaatcaatgggaacacactgtgacggaaataaagaattatgaattgataagagcaaaccattgatatttgcttttgttcctgggcaagctagtgaaggaacatgtacctaatgtatagaaatacaatggtcattttatgcttctgtctttttacagaagcactcagcaatttctgtgtctatttttagggaggaaaaagaaacacttttaagattcaaattgggtaagcttgggaaaagtttccacacaggctgattttctagaaatattgaaatataagacattatcagccctttctcttctaaattattaacctgtgacttcaatacctattctctgtcatcctcttacaataaaaaataattgattctccaactcagtaacactattgataatttttttaaaatctcatttcaaaaattgtactctaacataaactgttttttttttttttttcgtttttttgagatggagtctcgctctgtcacccaggctggagtgcagtggcaccatctcggctcactgcaacctccacctcccgggttcaagcgattctcctgcctcagcctcctgagtagctgagactacaggtgcctgtcaccatgcccggctaattttctgtatttgtagtagagacggggtttcactgtgttagccaggatggtctcgatctcctgtcctcgtgatccacctgccttggcctcccaaagtgctgggattacaggcgtgagccaccgcgcccggcccaaactgtttttattttcctcagtcatcctgccccatacaaagatactctctttacatagtagaatcgcagcatatagttttatattctgttatttcacttacgtatatgatatgacttcaaaataaaatggcatgtgagtctcatgaccttatagtcatgttgacaatactctatcacatatgtatttacataaatatagattaaaattttattttaaaaggatctgtgtgcatttttattgtatgtacatgtcatctcaatgttaaaaccattcagaattttaaaagttacctctttcacactgtcaggcttctcaactaagatagagaaaagacttgtttagagcctaaagctgagcaaaagtgagatacctggaagagtgagtcataggggcagaaagcagaatgacagtttccaggggctgcggggagggaggaatgcagagttgttgtttaacaggagagttgtggggatagatgatgattcacagcaacgtgaacgtatctaatgccactgatctgtatgcttaaaaatggttaaaatgaatcccagcactttgggaggccaaggcgggcagatcacgaggtcaggagatcaagaccatcctggctaacacggtgaaaccctgtctctactaaaaatacaaaaaattagccaagcgtggtctcagattctcgggaggttgaggcaggagaatggtgtgaacccggaaggcagagcttgcagtgagccgagattgtgccactgcactccagcctgggcgacagagcaagactctgtctcaaaaaaaaaaaaataataatgataataataataataatagttaaaatggtaaactttatgttatctatattttgccacaataaaaagaagttttaaaaaactaaatcaagatcattagaaaataatgtttgcttcttcagtcattttgaaatgtgaaaaaatgtgaataagaaatatattaatgttaaaaacttcttgagtttagaatagtaggttcagaaacaagtgaataaaggaatttcaccttaaaagtaaataaaaattaaactaaacagatgtggttcatagacctatgggaaatgaagtctttgaaattctgggaggcccagaattggtaattagttaactagttcaaagtctcatgcgtagtgaatgacagagacttgtgaaaacctaggcaatgtctactagacagtataaaatgattcaagttttcaacctcttgagaatttgaatttttaaatgttatattgtatttgaatttgcttttaaattcattaaatatgtattgtcttcaattttttaaaaatagtgtttctggttataaaagtacatatgtcctttgtagacaattttaaaataaagtataaattaaaaaccatctctggccgggcacagtggcgcacacctataatcccagtactttgggaggccaaggctggcggatcatgaggtcaagagattaagaccatcctggccaacatggtgaaaccctgtctctaccaaaaatacaaaaattagctgggcgtggtggcgcatgcctgtagtcccagctactagggaggctgaggcaggagaattgcttgaacccgggaggtggaggttgcagtgagccaagatcgcatcactgtactccagcctgggcgacagagcgggggaaaaaaacaaaaaaacacccctattcccattcctaatagataaaatttgttaatattttggtgtatctccttctaaggctatttctttttttattttcgtttttatttcttgtagagataggttctcactatatcgcccaggctggtctcaaactccttggcctcaagcagtcattctacctcagcttcccaaagtgttgggattataggcgtgagccaccacaccctgccaagcctatttcttatgcatataattaaaattattgtacataaaattttgtctcttcttttctttgcttaatattatattgtatcatatctctttaagttattaaaggttcttcataaatatataattttttttgagacagagtctcactctgttgcccagactggagtgcaatggcccatcttggctcactgcaacctctgcctcctgggttcgagtggttctcctacctcagcctcccaagtagctgagatgacaggtgtgtgccaccacgccctgctgatttttgaatttttagtagagacagggtttcaccaggttggccaggctagtcttgaactcctgacctcaggtgatccaccagcctcgagctcccaaagtgctgggattacaggcgtgagccactgtgcctggcctcataaatataattttaaatgccttcagagtattctctcttatagctacatcacaatttgcttaatatccatctctttattattggatattgtaggagctcagaacacgataccctaatggatggcactttggcatgctgagtgttttgagctgaaggagactggaagagcctcagaaacagcaagctccctctgaccttctccctccctcctttctctttctcccatttctccacagaagcaggtgatagaaaatggaattattcttccttaaggaagatagtagaaactagaacttcttacccctaaagcaagccagaaaacctagaaattaacctctgagcatctcccttctcccctgaagaccctcatgtgacaggcatcctgccctgtacctggagaaaagagtactacttttgtatttttagacataatgctattgcacccttgatagactacagtatggtgcaaacacaacttttccccctcctctactgtgaagggaacataacttttatatgcactgagaaaccaaaaaaatttgtgtgactcaccttgtcgtgatatttgctttatttcggcggtctggaactgaaactgcaatatctgcgaggtttatctgtacacgttttgcccctatgacatttaggccatttacaatttttgttataaataatgtggtgatctgcttctttgtgtataaagcctttgtctacctttcaaattattatttaatgacagttctagaagtagaattactatgtaaagattacaaatatttttacaacttttggtttatgttgctaaattgcttttttttttcagaagggcattacaaatctacactttcttttcttttcttttttttttttttttttttttgagtcagggtcttactctgtcacccaggctggagtgcagtggtgccatcatgactcactgcagcctcaacctcctgggctcaggagatactcccacctcagcctcccaagtagctggaaccacaggtacacagcaccacaccgggctaattttttgtgtgttttttgtagagactgggttttgccatgttgcccaggctggtctccaactcctgggcccaagcagttctcctgcctaggcctcccaaagtgctgggactacgggcatgagccaccgtgcccagcccacaaatttctatttctactttcaacagaaatatattacaccactgagtaagaataataagacctaatattcacgaggcatttatttgttaaccaagtactagttactatatatgtaacagctcatctttaaaatcttgtatactgttggtgaaaaagttgtctgttgttttaattttatttattgattaatagtgatatttagctatatttaaattttaagttatttgtaagtatttgtagttgtaagctatttttctattatgaattaccatccttattgttttacatgagctgtttatatattgctgtattaaccctctgtcaggtctgctttagctattttttgagttgtttttattgttttggttttttattgatacacattacatatttattaagtatatgtaatattttgtggttttttaaattttattttattaaaaagtttttggttttgagacaaagtctcactctgttgcccagactgtggcacagtggcatgatcacagctcattgcagcctcaacctcctgggctcaagtgatcctcccacctcagcctcccaagtagatggaccacaggcatgtgccaccatgcctggctaatttgtttttattttttgtagaaatgtctattcatctcctttgcccacttttcagtgggattacttgagttgtttgagttccttgtataatctggatataattcccttgtgggatgaatagtttgcaaacattttctcctattaaacaggttgtctcttcacttcgttgattgtttcctttgctgtgcagaagttttttagtttaatatagtcctatttgcttatttttgtgggggtttttttctgtgcttttgaggtcttagccataaactcttgccctacacctgtgtcctaaagtgttttccctatgttttcttccagtagcttttagttgtaggtcttatatttatgtctttgctccatcttgagtttatttttgcatatggtgatggacagggttccaatttcatttttctgtagaagcatatccaattttctaagcaccaattattgaagagggtgtccttttctcaatgtctgttattggcacctttgtagacaatcagttggctggaaataagtggatttacttccggattctgtgttctgtggtctatgtgtctgtttttataccaataccaccctactttgattgctatgctataaccttgtaatatattttgaagtcaggtagtgtgatgcctcttgctttgttctttttactcaggattgctttggctcttcaagctcttttttgattctacatgaattttaggattttttcccctatttctgtaaaaaatgacattggtcttttcataggagttgcattgaatctgattattgctttgggtagtttggtcattttaagagcgttaattcttctgatctatgaacaaaatatgtcttttcatttgtttgtgtcctcttcaatttctttcatcagcattttgtagtttcccttatagaagtctttcacttccttggttaaatttattcttagtcatttctcttttgtagctactgtaaatgggattaccttcttgatttctttctcagctagttcattattggtgtatagaaatgctactgatttttgtacattgattttgtatcctgcaaatttaatgaattcatttatcagttctaaaagtttttgggtgcaccctttaggtttttctagatataagatcatgtcatctgcaaaggggaacaatttgacttcctcttttccaatctggatgccttttatttcttcctcttgcctgattgctctggctaggactttcaatcctgtgttgaataggagtggtgcaagtgggcatccttgtcttgttccagttcttaggggaaaggctttcatcttttccccattcagtatgatgttagctgtgggtttgtcctatatggcctttagtatgttgaggtatgttccttctatgcctagtttgttgggaattcttaccatgaaggtatgttgaattttatcaaatgctttttctgggtcaattgagatgatcatatagtttttgtccttcattctgttgatgtaatgtatcacatttattgattggcgtatgttgaaccatccttacatccctgagataaatctctcttaataatggtgtattacctttttgatgtgctgttggattcagtttgctagtatttcattgaggatttttgcatctgtgttcatcggggataatgaccttagttttctttttttgttgtttggtccttgtcttagtttggtataaggataatgctggcctcatagaatgagttaggaagaattctctcctcttcacttttttggaatagtttgagaagaattggtgttagttctttgtaagtttggtagaattcagcagtgaagccatctggtcctggacttttctttgttgagagactttttattactgatttaatttcattactcattattggtctgttcaggtttccatatttttcttattcaatcttggtaggctgtatgtgtccaataatttgttcatttcctctaggttttccagtttgttagtgtatagttgttcataacagtctctgatgattttttgtatttctgtggcatcagttacaatgtctcctttttcatttctgattttttttttttttttgaaacaaggtctcactctgttgcccaggctggagtgccgtggtgcaatctcagctcactgcaatatccacctcctagattcaagcaattctcctgcctcagcctcctgagtagctgggattacaggcacgtgccaccatatccagctaattttggtatttttagtagaaatggggtttcaccatgttggtccacctgcctgggccttccaaagtgctgggattacaggcatgagcctctgtgcccggcccatttctgattttatttatttgtgtcttctctcctttttcttggttagtctagctagcgatttatcaattttgcttactttttcaaaaagacaacttttcatttcattgatcctttgtattgttttttaagtctgtatttcatttaattctgctctgatctttattattaattttattctactaatttggggtttggattgttcttgcttttttttttcctttgagtcagggtcttgctctgttgcccaggctggagtacaatggctctatgatggcttattccagccttgaccctctgggctcaagtgaacctcccactttagcatcctaagtggctgggaccacaattgtgcaccactgtgtctggctaaacttttttaatgttttgtagagacagggtctccctatgttgcctaagtatgttgcctaagctggtctcaaactcctgggctcaagccatcctcctgattcagcctcccaaagtgctgggactacaggagtgagccaccatgcctggcccgttcttgcttttccagttccttgaaggcatctttagatcatttatttgaaatcttcctacttttttgatgtaggtgtttattgatataaactcccctcttagcactgcttttgctgtatcccataggttttcgtacgttctatgtcaatttccatttgtttcaataaattttttttaaattttctttaagatattttacgtttcttctatgttgtggaatctattgagttttactttatgattcatccttgctttttaaaacatttaattttatttaatggttcagtaataataaagatacccttttacatgtttacagtacctcattgtttacatacactatttcaagcttttggaatagggacaactaaaacagattcttgtgtaaatgagtttctttatataacttcacattctttatgtaatggttcttttgaagcttaacaagttctttctcaacaactgtatttttttaatgtggaattgactaagtatatgaaaatatgaaataaacaaaataaaatggaaaactatgaggtccttagaagtcacattacatccctatatttggtgacatttaaagagatgaatgacatcattgagaagtaaggagaaatacagtgcagcaaatcaagaacatgccactcatgtaagagtgaacatctatctccaggcatgagaaaggtctagagagttcttaacaaaatgctgtcagtgtttatttctcagtcttgagacgtcagatgatttttatgatcttctttgtgcttttctaatttgtttaatattttacagtaagcatgtatcatttttactaaaatatccacgttattgtttaaaacaggaacaaaatttttctacatgcacaaggataatagtatttgtctatatttttttctggtcttttaattaagtgtttatacacacagagagacaggaataaagttttccttagcatttaaataatttccaagaagtatatacattcctacatatgggttaaataaacacacatatgtcaataaacatatattctaacaaactcaggcctgctaaatgcggctaaaagttcccagtgaaaagaactcttaggtgagctatattttctaatctgcagaccctcctactgcataactctggatgatgtcatacaaacctcttcctgcatctgggactctttccagctgctacatgtgggagcttcccgtttttgttctaattgagtgatgtttactggaaatggagtctgctaataagatctcagttcagatagctttgtggggacaggaagaatgattgtgagatgaatttggccaaaaacctttactttctcccttgtcattatcttgttttgataggttggcttagttttgttttgaaattacctcttctgagaaaccaaagaggaacgatatgcgctgtcttcttcttcctcctcctcctcctccttttcctcttcctaccaagactcccaactcagactgtttttcagtctgtccctccatacatacctgcacactcacacatctactagagagtatatggagacagccaagagcccttagaaagatagctgggtaatgtactactctgttctcttgaatttggatggaacttatgacaacacttagatgtgaacaaataaggcaagagaatttgtcccagattgcacagctggttatggcagaacaaagcggtggtgaacctagatttcatatctcctagctcagggcctctggattaaaacccataaacattgttcacatttttttggaactatgcataagggcaacttagagagttccaggtaagagaatgcagcataacaagagttgattgttttaagttgtgttatgttaaagatcagctaagtaaaattaaagagaaaagctgctaaatatactgaattatttcatttttgtggatctccttgattgtgatttgcgagctcagaagtattaacagtttttctcaaaaattttaagatgaaaaattctcaagtccaattaattgaaaagcttaagactactctataccatgcttcactttagaaagtagggagcttgttgcaaattcaaacaaggatgtggtgtcacaactcatgaaaggaatctcttatcaaatatctatcctaccatcaaattgccattacatctgcccgaatgtacatgggacacagttgcgtcagaaaggctaaagctccaaataagttcacattattctgaaactatcagattatgtgatggatataatttgggtgttacagtctttgtagtaaagtttgaggaatgacaccaggtatggtcgagtgcagtggctcatgcctataagatgagcctaggcaacatggtgagatcccatctctacaaaaaatacaaaaattatccaggcatggtggggtggtgtgcacctgtagtcccagctactcaggaggttccagtgggaggattacttgaaaccaggaggttgagactgtagtgagccatgtttgtgccactgtactccagcctgggcaacagagcaagactgtctcaaaaaaaaaaaaaaaagaaagaaagagaaaaaaaaaccccatcaggtaaaatgtagggccactgtcaatgggggacatagagaaaacagagatcttcaattctcttctgcttctaactttcgggacaaggacattttttctccacatgttatcagtaaggtgaggagaaatagagaaagagcataaactttggtaagcgaagatagaagcccaagatggaataatagagtgagaaagagcccaaagctgctccaagtgatttcaagtccccagttttgaagaatgatgtctttgggtcttgagaaaacattgttgtgggatcaccaacaatcgtcagggatatttggggcatcatagagaataggagagattccagaagactggtaacagtggagtattctgattttcagaaagagaaagcagagccagaaaaaaatgtagataatggtctgtaacctcaatctcaggccagagtctagaaggggggattattagaggaacagtttcaggcactagataaaaaaggaatgattaagatccagatgagttcactaaaaacaagtcagggctaatttatctcttggctttgacagagttaccagcccagtacctcagggaatgcccatacatatagaatattttgttatcagttagacatttaataaagtttttttttcatgatattcttttggacaagacagagagatataaactgaattgtggcacactgaatgaattagaaaccagtcaattgtacgcacaggtgctggctaacaaactgtaaagaagcatgcagtggtgagtcccaggctgtgtctgtccttcactgtctcctcataaatgctttcagaataaatatacagaaggtgtgctcatcagatttataggcaacatgaagttagagggtatgatgaatacttgaatggcagaacgaaaattcctaggttgaatctaaaaggatgaaatttaagggtgattaatatgaggtctaaggaattaaatctatcagtgagaataagcaatacttgctttaacggtaactaagagccttaactcaatatgagtcagaagtgtaacgtggttgccaaaaaaactaagattttaggctgtatccagtggtgtggtaaatatttaacaactggccctgggttgggggcggagagagggagggaccttgatttatagctctgaccaatctctgtagtgtaaatactctcaccttggccagtttcaaggtactgactttgtggcactgaactcagaggttggaagagatgtgtgatagcatgccattatgtggtatttccaccacacagatgcagtagatgtgattaacctcaagaggagagataataattaaacacagtaaaattactaggaagtagtattttaattacttattacctttgtttttaatatatctaattgtaggcttatgtaatttaactttaatttttaaaattattattattattttcgagacagggtcttgttttgttttgttttgttttgtttttgagacagagtctggctctgtcgcccaggctggagtgcaatggcgtgatctcttctcactgcaacctctgcctcctgggttcaagcaattctcctacctcagcctcccaagtagctgggactacaggcacgtgccaccacacccagctaatttttgtatttttagtagagatggggttccaccattttggccaggatggtttcaaactcttgacctcgtgatctgcccaaagtgctggaattacaggcgtgagccaccgcacctggcctgagacagggtcttgctctgttacccaggctggagtacggtggcgtgatctcagctcactgcagcctcaatctcccaggctcaagcgctcctcccacctcagcctcttggatagctgagaccacagacgtgccccaccatgcttggctaatacttttttaaattttttgtagaaacggggtctcactatactgcccagactggtttgaactcctgggctcaagcaatcctctggacttggcctcccagagggctgggattacagacgttaaccaccttgcccagcataatttaacttttaattagaactgcattttacaactagctcagaaaattcttgaacatttaactatcagctcttgcaagtttgtgcacatgggctctggaccatggtaaccagaaatgcagtcactggtagaagggaggtgataaccctgctgttctctgcatttgtcaggacacacccagatccctttattccagaacacataacttaaagtcacactttcctgagatcagagcagaggatggcagagaaccaaagtcacgagtgtgtgaaacaacggagaggagcggcgctgtgcagcctggagctcaagacacttgcatgagcggtgagatgagagggacaggggagagcttgttttcaaatatttgagaggctgttgtgtaaggaaggattagggctctaattggtgggtagaaaaggatacaaggagacagatttctgttcagtataaggaagacatttctggctaggcatggtggctcatgcctgtaatcccagcactttgggaggccaacgtgggcagatcgcttgagctcaggagttcgagaccagcctgggcaacatggtgagacccgtctctactaaaaacaaataaaaataattagctgggaatagtggcacacacctgtggtcccagctagtcaggaggctgagacaagagaatcacttgaacctgggaggcagagattgaagggaactgggatcactccactgcacttcagcctaggcaacagagcaagaccctgtctcaaaaaaaaaaaaagatatttttgggaaggagagaaaaaagaaagaaatttcttacaggcaaagctatctaaagaggaatgggctgaaggcaatcctgcagaatatgggcaatgacctttagggatggtgtagagatggttcacgcatcaaaagaggggatggggctggataatcttgaagacgtcccccaagtctctgactacctgatttttgatccattgtgctttctagttgcctcagcctcccaaagtgctgggattacaggcgtgggctgccgcgcccagcttacaactatcaattttatatctaatcttacatcatctatcctcccatctacctaccatccattcctccagattcttgtggaacaaatgcctgaacatatcattgagtccataaacacgtcagtatgcatctctaaaacataagagcattttgaaaatatacccacaatacttttatcacacttaagaaattaatattgattctctaatatcatctaatatccagtcattatttaaattttcccatttgtgtcataaactttttatttgagcttgctcaagtcaggatgtagggtccacacatcgccatggttagatgggtttcttaaacctcttttaggctgtaagtttccctttcattatttatttgttgaaggtgccgtgttatttgtcatatagaatttcccagtctgaatttttaaaaattgcattatggcatatttaacaagtttctctttcccctatattttctgtgataacgtttatgtttgattctttgggaaggaatgctttgttggtggtgtcctgtatttctcactaggagaatagtggaattttgattttgttttatagggattgcttttcaattcaactaggagaatagtgagaaatacagtgagaaattgtgacgtcagcagccactgatgataagcgtctagatctgttaattcatttgcagttctaaacggtgatcttctaattttctcattgctcctttaattattagctggaatacttttataaagagaaatatccccttttcaatgatatggttacgctgaagtacagaaaatgtaagataaatgcttcattacctgtgaaattcaaagcaatgagttggctcccaagcatctgcctaggaagaacaatgagctgttttgtttctttttaagcattatgatgaactaatggatttaaaaatatttgatgtgttttaatcaattgctattgttatttttattaatattcaacttggcttccaagtctttttaacatgatctgacttatttccttgatttctaatatgacaagatctcttacattccacattcaactcatgtattttctgccccagatcaggaattggccatttctccaaagagtcctggttcctttcaatgggaaatgaaatttagagaccaaactctgggctccagtgttgtcagcctactaggttgatcatagtttctggggctttttagtagaaagaattaggaagttctccttcctttcttcttcctcctctcctttctcttcttcctcttcgaaaatatattgtggttcatacgacattttcttttcttttcctttttttttggagacagagtttcactttgtcactcaggctggagtaaagtggcatgatcatagtccaccgcagccttgaactgggttcaagtgatcctcctgcctcagcctcctgagtagctgggattataggcacataccaccatatcttactaatttttttatttttatagagagagggtcttactattttgcccaggctggtctcaaatttctggcctcaagtgatcctcctgccttgacctcccaaagtgctgggattacagacatgagccaccatgaccagcccatatgacatttcaaacaagactacgagatgttttttcaacctcgtcaatctcacatttatactttttttcccttattgaaaatcccaattctcaaagacatcaataaaattacttatttgctttatttcacaaaaaaaatgcaactgtcttacaataactgttctaagacccaccaccaaccatatgactattgaaatacatttaaggtcgttatgtagttctttttggttttatggcgtatcataataatgaaaatcaaattaaagtcacttgaagtagttccttcctgtgtggttattccgccaactcagagtgtacatttcagttcatttgtttcattttggttttgtttcatagggattgcttttcaattaaaaatattttataattatgtaaaatgattacaaatttctaaagtcaaatctacaacagcaggcatattcagaggagtgtgacttctatcccagtccctctaccctatctacttcccaacaaagtcttttttaagaaataaagttttatggcatattctctcattaaaaaaataaggaaacattttcatatatcaaattctctctttttagataaacagtagcatactatagacaattttttctaccttgttttgttttcactagccataaagtctaaggatcactccatatattcctcgttcttttttacagctgtgtagtactctgccatgtgaactgtgcatagtattatttggatgttaaacacatttaatcaaaattaaaatttaaggaaattttagcatggtcagctgaaatagaattcaggtgtctctcaaaatttgtcctcccacctatttatttgttttatttttgtttatttatttatttatttgagacagagtctcactctgttgcccaggctggagtgcagttgtgctatctcgactcactgcagcctccacctcctgggatcaagtgattctcctgcctcagcctcccaagtagctgggattacaggcacgcaccaccatccctggctaatttttgtatttttagtagagacggtgtttcaccatgttgaccagactggtcttgaactcctgacctcaagtgatccacccacctcagcctcccaaagtgctgggattacaggcatgagccactgcgcccggcccagtcttttcatctacttagtggctccaccctgtttttgcagttcctacacacttacccctgggataccctctccagcctgagcaaaggttctacatttttcaaatgattttcagacatctaagattagccctttattggtccaaccccttgaaaccttattcctttttaggtgacaatgcatgctgaggagttcatttaaaggtaatttctgcaaaacctttacccatcacatgccatctctcctgagtaacaagaggccttgatctcaaactccacatatgccagggcatcaccggttgctctattaagcaccatgtttcagtgccttagtactgtttgtaaaacaaagcaactaataatcagaatttatcctgggatcttattgggaagaaacatcctgaaataaccaagaaataacaataatggtaaatcatatgtataaatgaattctagagatgaaggctgtggcaacagtctttctttccttttaatattccttatgtgggtagcagaaatatcaagtttgcaaatactctgcctgggagaaccgccacttgtacctttctctttctggtacagtctttttttttttttctttttttaaacggagcctctctttgtcatccaggctggagtgcagtggtgctatctcggctcactgcaacctctgcctcccaggttcaagtgattctcctgcctcagcctctcaagtaactgagattacaggcgcccacttccatgcccagctaatttttgtatttttagtagagacggggtttcaccatgttggcctcgaactcctgacctcaagtaatccacccgccttgacctcccaaagtgctgggattacagggatgagccactgctcctagcccctggtacagtctttacactgaaaaacggatgcacctaccacagtataaagatgggagtttactttggagacagaagacaggaatgaactgcatcaaaatgataggctcagagttaaaaatatgagaaccgtcagtgatttcacacacacacacacatgcacacacacacacacacacacacacagacgcatgcacatatgcatgcctatagcttatttctttagaaactagccacagaacccattgaaacccagagagctgtggaacacaattagaaaaggcctgggacaggagggctggagtgagccttctgagcagcccagacctcacattagcaggacagaagttagcagcgtagaagcagctggcaggactagagctgcctagccattatagctgggtttcctggcatctgtcttgaagggaagggggattggttactattcagtaacttcaggttttttgttttttgtgtgtttgtttgttttgagactgagtctcactctgtcacccaggctggagtgcagtggcgtgatcttggctcactacaacctccgcctcccgggttcaaacgattctcccgcctcagcctcccaagtagctgggattacaggcacttgccatcatacctggctaatttttgtatttttgtagagacagggtttcaccatgttgtccaggctggtcttgaactcctgacctcaggtgatccacccacctcggcctcccaaagtgctgggattacaggcgtgagccaccgcgcccagacaactcttcatttttttaaagaaaatttcagaagattgcctcaggtgaaaccacagtaaggagatctaacatatggcattataaaatatgaatttgggcatgatgatatgcattatgcaatttaccatgacatttataaagtcaagggatttaggcctagaagtgtccatgaaagattcaatgctttaggtcttcatttatttgtttgtgctgtgcacttggtttggaattccctttccctgtatcatttcatcctaatgaacgcctacttattttttaagactcaatgctattacctcctctatagttccataacagtatatatatttcctgtaacaatattatgttgtattataattgtttgcatattgcctgttttctactaggctgtcagttcttttgggagaggagcccagtcttcatacctcagtgactaacttaaaagacacttgatgtttattaagtgatgtcagagaccaactaatccagttcctctaagtagatgaaactgaggcccaaaggatttccataaattcagtaattccacaagtatatactgagtatttacaatgtgcctagcgctaggtaaggctaaatgtctttagtgtattttaaatatcatttggagtatgcttaatttccatttgtccagagatcaaaagataaatgccagcatctcatgaatcctcaaagcaatattgaattatgttcagaattggtttatatcaatttattttattgtactctaagtgtgtatcacccaagaatgcaatctgcatactgctaatgtgtgtgtgtgaggtgggggagggatggtcagagtgttcaatgcccaatataatgcccaatttaggaaacactgggttatattaggttaaatagattcttccctgaactttcaacatgcttgatagtgactagttaaatctccaagaagagcatctaatatgcactgtttcccaaatttatttgcctagtgaacctccccttttttgttgctcctattaatagctgcctgcaatgcagttcggaagaacatagagttggtcggtgcagttctttgaagagtcctcatctgtgtttagtgaggacttcaaagggaaactgtaagctccctggggaggaaagtggatggaaggggagaagggaaggccggagaaggagcagctaaccaggaagacacgggaggtagcaggtcactgtctagggtctaagagagggacaggggccataagcagacaactgaggagcatgtttccatgctaagctcagtgagacatttggggctcaagcagatgggctttggggtcaagagataaggtgtttcacaaggagagccaggagcacttctgcaggaacatgcagcatgtcttcaggcctctggggattccagaggacatggcaccctgcctgcaggtccccaaggactgccacatgtcagggccacagtgtctgtggggacaggagaggaaggaaatgaagcaggcacaaagtaggttactgagtggtttcatcaacatctgtgacacccactcccagggggttcctggacatatttggggttaggtttaacaaggggcagtagctatggggaacaatatttgcagggcccaatgcaaaatgacaacacaggccccttgtttagagttaagaatttcatgattgtgacagctgagcattaaaccaagcaccaggcccttctgaatgcagacctctggacaactgtacaggttgcacacccatgaagctgccagagagttctcagtggtcctaaagcccacttgaatctcctggctactgtggcctggagaaaccaggttacgcatggtttatataaaaagttggtctccctattccaacgtatctgattatcatggaaacactgtttaccagttgctatggtctgaatgtttgtgtctcccctcaacccctgcaacattcatatttaatccccaatgcagtagtattaagaagtggtgccttaggaagtgatgaggtcctaaagtgaatggggtgaatgggattactgccctgtgagagagaaccaagggcgcttgtttgccccttccacaatgtgagaacgcagcaggaagatatcctgtgaagcagaaagtaagccctcaccagataccacatccgttggtgccttgactttgatccagaacagtaaacaatacatttcttttttttttttaattatactttaagttttagggtacatgtgcacatcgtgcaggtttgttacatatgtatacctgtgccatgttggtgtgctgaacccattaactcgtcatttagcattaggtatatctcctaatgctatccctcccccctcccccctccccccaccccacaacagtccccggtgtgtgatgttccccttcctgtgtccatgtgttctcattgttcaattcccacctatgagtgagaacatgtggtgtttggttttttgtccttgcgatagtttgctgagaatgatggtttccagcatcataacaatacatttctatggtttataaaatacccagtctatggcagctcagatggactaagacaccagtcattctgggtaaactttgttgtaagataaatttatttatttattgttaaattttaaatattttcagagagggggtcttgctatgttgcccaggctggtctcaaactgctgggttcaagtgatccacctgccttggcctcccaaagtgctgggattacaggcgtaagccaccatgcccaggctgttataagataaatttaaccagcctaggcaacatggcgaaacctcgtctctacaaaaagtacaaaaattagccggcatggtggtgcatgcctgcagccccagctactcaggaggctgagaggtgggagtatcacttgagcccaggaggtcgaggttgcagaaagccatgattgcgccactgcactccagcttgggtgacagagcaagactctgtctcaaaaaagaaaaaaaaaaagtacacattaaattccaggaacatatttaatgcagaaatccaggcacattcaagctatttccatatatagtactcacaccataaacagcatccattctcctcacgctgagaatcaaggcagatttgcagctgcattgcagacgagtataacctttgactttgtcctggggttcataccagtattcatttggtgctgaggcagcactcagcacccgtgctgatttccctcaaaaatgaaaaacaaactcaggtggaaaatctgggcatgcaatgtcatttgctatttttggagatgagggagaaaaaagaagttgtggaaagtgttgtaataagcagcatagaacagcagcccatgagtgtgaaataaaacaacacccgcatgctcttcttgacagtgattgaatggaagcaacgaagtggaggagaaaccacgctggggagagctggcatccccttgggagaagcctttccaacagtggactgaaagcatgagttaccttaccctgtaagattaatctccaaccaaacagcaatcttacctctgagatacaggcatacctcagagtttatgtgggtttcaatcccaaccactgcaataaagcaaatatttggaataagtgagtcacacagattttttggttcccagtgcatagaaaggttatgtttatactatactgcagtctatgaagtgtgcaatagcattacgtcttaaaaaagtatataccttaatttaaaaatacttttttgctaaaaaaaaatgttaacagtcatctgagcctttagtgagttgaaatctttttgctagtggaggatctcatctcaacactggtgactgctgactgatcagggtggtggttgctgaaggttgggtggctgtggcaatttcttaaaataatacaatgaaatttgccgcatttattgactcttcctctcacaaaagatttctctgtattgtgagatgctgtttgatagcattttgcccacaggagaactcctttcaaaattggattccatcctctcaaacccttagttgatgctttatcaactaagtttatggaacattctcaatcgtttcttgtcatttcaacactgctcacagcaccttcaccagaagcagcttccatctcaagaaatcactttctttgctcatccacagaaagcaatttctcatctgttcaagtttaatcatgagattgcagcaattcagtcacatctccaggtaccacttctaattccagttctcttgctattttcaccacatctgcagtgacttgctccattgaagtctcagaccccacagtcatccacgagagttaaaatcagcttcctccaaactctgttgatgttgatagtttgcccttctctcatgaatcatgagtatttataataacatctaaaatggtgaatcctttccagaaggttttcaatttactttgcccagatccatcagaggaatcactatctatggcagctacagccttacaaatgtatttcttaaataacaagacttgaaagtcaaaaatcactccttgatccatgggctacagaatggatgttgtgttagcaggcatgaaaacaacattcagctccttgtacatctccatcagagttcttgggtgactaggtgcattgtcaagaagcagtaatatattaaaaaggaatcttttttattttttgagtagtaagtctcaacagcaggcttaaattattcagtaaaccatgctataaacagatgtgctgtcatccaggctttgttgctccatttatacagcactggcagagtagatttagcataatacttaagggtcctaggatttccagaatggtaaatgagcaccatgttcaacttaaagtcaccagctgcattagtccctaacaagagagtcgcctgtcctttgaagctaggcattgacttctctctagctacgaaagtcctagatggcatcttcttctagtagaaggctgtttcatctccatcgaaaatctattgttcagtgtagccaccttcatctatgatcttagctagatcttctggataacttgctgcagcttctccatcagcacttgcctcttcaccttgcacttttatgttatagagatggcttcttgccttaaatctcatgaagcaacctctgctagcctcagacttttgttctgcagcttccttacgtctcccagccttcgcaggattgaaaagagtttagtgccttgttctaggctaggctttggatgaagggaatgttgttgctggtttgatcttctatccagctcactgaaactttctccgtatcaatgctgtttcgctttcttatcatacttgtgttcactggagtagcacttttaatttccttcaagaatttttcctttgcattcacaacttggctatctgtttggcacaagaagcctagcttttggcctgtctcagcttttgacacaccttgcttactaagcttaatcatttctagcttcggattcaaaaatgagagatgcacatgattcttcctttcacttgaacactgagaggccatcgtagggttgttaattggcctaatgtcaatattgttgtgtctgagcagtggagcagtcagtatataacatttattaattaagcttgctattctgtatgggcacagtttatggtgccctaaacattaacaatggtaacatcaaagatacctggggccaggtgtggtggctcagggactgggcaaagtggttcattcctataacctgagcactttgaaaggctgagatgggaggatctcttaagcccaggagtttgaggctagcctgggcaacacagtgagaccccatctcaaaaaaaaaaaaaaaaaaagaatactatagattgagtggtttaaaaacaacagaaatttatttctcacagatctggaggccgagaagtccaggatcaaggcactggcagattcagagtctgatgtggcctgctttctggttcatagttgttatcaccttgctctgtcctcacatgactgaaggagcaaggaagctcttctgagtctctctcatacgagcactaatctcattcatgagggttctgctcattcatgaatttcctcccaaaggttccgcctcctaataccatcaccttgaggattgggattttaacctatgaattttgcgggacacaaacattcagtctatagcagatggaagatgaagcccagctttctaggaagcccccacccgcagaaatttatggagctaaaaaactgcccttcaactccctccatttccttggctggcctcttcccccgacatctccctgttgtttctccacagggagcttttattcattgagaaggccagaacagagtggggacagccatgaggtgcagatagtgggagcctagggcggcagagaaggatgaccagagggcctgggggcaggagtgtcacctatggaaggaatggatcctggggacaagctgcgttgtcggctctgactaggtggggcggggcaggactgtgcgatgggcaagtgtgaactgttactgtctccattatgcagatgaaggaactgagactcgatcatgagggggattcaattctggtccttgtcactctgaggcttgtgtcctttctgcgctaccaagctttgtctctgcttctcaagatggtgatacaactactaattcataaagctctgcaagagggtggtggttttgagttgtaatttcaatgaagagggagaagaagtagaaagaaactaggtttatttttatgctttggaatattgattgaaagaatcaaaaggatataagaggataaggcaggaaaagtggaacaagagctaaacaacaaagcctggaaaatagactatactaatatcttaaaaagctgatggattgaaggaaagattcgggtgaggggggacaactgaagatatgaatcatgggtaaagaggaggatgtgatggtctttgccaagcaccagcactggcagtgggagtgtgtggggtggggtctagcgctcatgttcatgacatagaggaggacctgggcctagagccactcagtaaactggtggcagagccagggtaaactttggtctcctggccccaccttccagggctcttttctctattttgtgcactcagagaagggagttaaaagatcaaagatgtggaaagcacatgtgaaaagttagaggacacccacatagtaagaaacttagggccaggtgtggtggctcatgtctgtaatcccagcactttggagactgaggtgggaggatcacttgagcccaggagttcaagaccagccctggctacatagtgagacctcattctatgagaaaatgagaaataaataagccaggcgtggtggtgtgaacccgtagtctcagctactcaggagactgaggagggaggattccttgagcccaggctgcagtgagctatgatcatgccactgtgttccagcctagatgacagtgagaccctgtcccaaaaaacaaaacaaaacaaaacaaaaaacaagaaacaaacaacaacagaaaaaaaacaaatttaggcttaccacttgaggtggacttgatactcctaaaacctgaggggtaataaaaagatgcaggttgaggtgccaggaacaaagaatccaagactgcagctttgaggctttcaagggaagagggtccatcatgaccaagaaaaaattttcagcacatgctgtgcaggtaccagatgcaaggagtactataaaaagtctgaagatggcgacctccagggaatttagtcgccccagcaggaaggcagccattccaaagacgtcccaatgcagtgtataatagccacaggcagttaagttagtcaggaaagtgagcacccagagagaatggaaggagagagggaaaaactgaagaaatgtgtagaaagacaaaaataagacttaacattacgattttagacaaagcagcatgaggaaatgtaaatttttttaaagaaagtgattagataaaacatccaaatggaaacacatcttgtaaaccgacgaagctcacagactgaatacaaaacatcacatttttattttaaacttaaaaaattaaaaatgtcggatgtggtgaagcatgcttatagtcccagctgcccaggaggctgaggcgggaggatctcttgagcccaggagttggaggctacagtgagctatggcaccactgcactccagcttgggtgacacatcaaggctgtctctaaataaataaatacaaataattacattcaaataaagtaaaaagtccaagcactacaaaaaggtttaaaaagtcttactatcactgccaccatccgtactcttctcactattaacaatgtattcatgactgcagaaaagtatcttacaattatatagaaatgactcataatttatcacatacatacacaacacacacttttagaaatgcgtacacatgggtcgtacagtacacattctgtggcatgctattgccttgattgcatagtcatatatctcagagctcaaaccaccttttcaaaatctctacggagtagcgtgctatatggtattacataattatttagtgaattcaccattgttgggcatttaagctgtttgaagattttgctgttacagctatagaaatgaacatacttggcatatttttttgtgtgtaacctaaggtaaatgtttggcagtggaatcacttggtcaaggggtatgtatgtatttctttctttcttttctgattttgagacagagtcccactctgtcacccaggctggagtgcagtggtgtgatctcagctcactacaacctccgcctcccaggttcaagaaattctcctgcctcagcctcctgagtagctgggattacaggcacccgccaccacatctggctaatttttttgtatttttagtggagacggggtttcaccatgttggccaggctggtctcgaactcctgacctcaagtgatctgcccaactcagcctcccaaattgtggggattacaggagtgagccactgtgcctggcttaattttttttttaactgtggcaaaagacacctaaaaattactatcttaatcattttttcagtgtacaggtgagtggttttaagtacattcatattgttgtgcaaccctcaccaccagccatctccagaactcttttcctcatctcggactgaaactctatacccattcaacatgaactccccattctctccactgccctccgtgtccctcccgctagcaaacaccattctattttctatctgtatgattttgactactctggctaccttgtaaaagcggaatcatttgtctttttgtgactggcttatttcacttagcgtaacgtcctcaaggttcattcatgttacagcatgtatcagaaattccttccttttaaggctgaatagtattatattcactgtatggaggtatgtattttaaatttgcagacagatatgctgaaattgtccttctaaaaggtgataccttcattcccaccacagcaagtaggtccagccacatttcccccaccctcaccaatcctgcttactatccagcctcttcatgctgccagtttactccatggaagaggaatctggttattgttttcctttgcatgcatgagtaaggctggtcaccgtttcacagatttattggcgacttttttttttattgttgcatctgttgatatctttacccattgttttctcttgggctttctttttcttagtaatttgtatgcgttcttaataaattaagaaattagcccttttaatatcttatgttgcaaatacctgttcccagcttatttatctttttactttgtacacagatcttcttgctgtttactttttattttatttatatatatttttgagacagggtatcactctgtcacccaggctggaatgcagtggcgcgatctcagctcactacaacctccacctcctgggttcaagcaattctcctgcctcagcctcctgagcagctgtgattacaggtgtgcgccaccacccatggctcatttttttgtgtttttagtagagataggttttgccatgttggccaggctggtgttgaactcctgacctcaaatgatccgcctgcctcagcctcccaaactgctgggattacaggtgtgagccactgcacctggcctattttttactttttattatgaaaaaatccaaaatatataaatcaaatatatttaaaaagtagagaaaagagtactctgtgtacccattaccaagtttaatctccaccacacctcaaattattttgagagccaggcatggtggctcacacttgtaatcccagcacttgggaggcggaggtgggtgggtcacttgaagccaggagttggagaccagcctgggcaatatagtgagacctcatctctaaaaaaaattaactgagtgtggtggtgtatacctgtggtctcagctactcgggaggctgaggagggagaatcacttgagcccaagagttggaggttaagtgagctatgattgtaccactgtactccagcctgggtgacagagtgagaccctgtctcttaataaaaaattattttgaagcagatcccagacatcatcatttcatccacaggtgttttcaacgtgtatctctaaagacaaaatttttttaaaacgtaactataaaactataatcatatgtatgtggttttaaaatataaaactgttcatttctaagcaaacatcagtcattttctatatgatttctgggttttgtgccatgtttgcaaagtcttcataacagtattataaataaattcgcccatgttttcttctagcatttattttactcaaaaaccattcattaaattcaaaattattgtccagcgcatgcaaagttcttaagttctggaaagacacagagtcacagggtaatcagagccaagagagttaatttccctgccccctttctcacctgtaaaacatctgctgccatgaaaccccttttcagaccctgtcctccttttccctctgtagacaaccttcctgacctcatgtgtgggtcagaaccccctatggactctttcgcctctggcttcctttttttttttctttttaataagagtgttattaaaatataattcacatataaaatgtacccttttaaagtatgcaattcagtgatctcagtatattcacagttgtgcaatctttgccattatctaattttacatttttttcatcacccccaaaagaaaccttccacccattaagtgatcacttcccattttcatgtccccacgagtccccggcaaccactaatctactttgtctctatggattcccaagacatttcataaacatagaatcacaatatgtggccttttgtgtctgacttctttattgctagtacttttagagtctcattttaacattttacatcatactctttctggaatttactttgatgaaagaagaggagttatacagcttgactctttttttctcccagatagtcctgccatagtctcaacactgttttctgaataattcatctttcctctcatggattagaaatgtcaccactatcatctactaaattctcattttagtttatttctggatttcctattttattccattatctatctaaatctctgctagaatcaaactgggttatttttttcacttatttacttattttagtgatggagtcttactacgttgctcaggctggattcaagccatcctcctacctcagcctcccaggtagctaggactacaggtgcgtgccacccccccgcagcttaaatgttttaattcttgtaacttcaaaatgtatttaaatatttaatctaactgcctcccctcccctaatatctttctgttgagattttcttcttggctattctttcttgtttatttctacagatgaccccaatattatcttgtaaaatgttgaaaagaaatttttaaatatttttattgggatcacattgaattgatagattaaatacagcaagaaataataccccttaatagagattttatattttctttatatggtcctgcctatttctagttaagtttattttcagataaattgatcatagtgttcctatttaaatgggatcttttctttcattatattttctaacgagccattttgtacagtaattatacaaaaagtaactaactactttactaaaattctcttataatttctgttagcttttctggcaaaacaaaccacccaatacttagcgtcttaaaataagaaacattatttctcaactctgtgggtcaactggcagtttttctggtctgggccaactcggtttatttctgcagaaaactggcactttaattggcctcgatagacgagagtggcttcactcagatgtctggtagttggttctgtgtcagctggagcaacagggatgaagagtctgtgtgtttctcatcatgccgcgggctaacctaggctcattcacagagcagtggtctcagcctcttaaaatggtaaaagaaggcaagtcttaacacacaaacagttttcaagtttctgcttgcatcatgtttgctaatgtcccattgttctaaagaaagtcacatggttgagctcatagtgtgaagaaatatacttcatttctgagaagagctgcaaaagattgtagctgtttttgcaatctcccccagattcctaacatttctttttggcctatttttgtcaggtttctagttattatttgatatcatttaaattaataaatcctccttacctcaagaggtaattttaactcttaaattattttcttacttaatcatactggttaggatttccaaaacattattaaagtatagtatcttactttaaaaggttactgatgggcctgtaattccaggacttttggaggctgagggaggaggatcactggaggccaggaatttgagaccagcctgggtgacatagagagactgcccactacttctacaaaaataaaaaataaaaaattagccaagcgtggtggtgtgcaactgtggtcccagctacttgagaggctgaggtgggaggatcactgaagcctgagaagtctgggcttcagtgagccaagatcatgcctctgcactccagcctgggtgacagagtgagatgctgtctcaaaaaaagaaagaaaaaaaaagttactaatggttatctaatgggtcgtgggattatagggcttcctttttattattttgcctcttgttagtctctactttttctacaatgaatatgtgctgcttatataatcaaatcattggtttgttggcacaccatcactttgggatggctcagagcgtcccagttcaccctaaagtgtaagctgcagtaaccatcctggttgtaaccagaatctttgttctacaatttggaattggagtctccttataatctaaagattttgtagttgttaacatattaacactttcgattttataatgtattcttacgtgtcttttaagcacatacttctggctgggagtggtggctcatgactgtaatcccagcactttgggaggccaaggcgggtggatcacttgaggtcaggagttcgagaccagcctggccaacatggtgagaccctgtttctattaaaaatacaaaaattagccaggcctggtgccgggcacctgtagtcccagctacttgggaggctgaggcaggacaatcgcttgaatccaggaggtggaggttgcagtgagctaagatcatgccactggactccagcctaggtaacagagcaagactttgtctcaaaaaacaaaacaaaacaaagcacatacttcctcaaagtgctttaaggtacatgttaatttttttaattaaaattttttattaaaaaatatatatatctgtgtagtgtgagaacaaaaaaagaaaaagcataatatcttctttctttaatggaaattaaagtatgatgctgaatttttataatggcaaaaataatctagctatttctaagatactaagactctggtttttgttttgattttggtttgtttgttaaatcaggaatgaatgttcaattttgctaaatggcatttcagtatctagtgtgatgattatactttttcctttgatctgttaatatagtagcacattggtacaattcctttttttttttttttttttttttttttttgaggaatctcactctgtcacccaggctggggtacagtggttcgatctcagctcactgcaacctctgcctcccgggttcaagcgattctcctgcctcagcctcccgagtagctggcatcacaggtgcccaccaccatgcctggctaatttttgtatttttagtagagacgggggtttcgccagtttggccaggctggtctcgaactcctgacttcaggtgatccacctgcctcagcctcccaaagtgctgggattacaggcatgagccaccgcgcccagtcggtacaattcctaataatgggccatgcctgcatttctggaacctcactgggttgaggagtttttttgttattgctggtatagaacaattgtgtctccatacatctgcctattctggacatttcatagaaatggaatcatactatacgtgaccttttgtgtctagcttctttcacttagtgtgttttcaaggttcctctatgctatatcatgtatcagtaaatcattacttgttatggccgaataatttctcattgtatggatagaccacatagaaatgcttttatgtcatctaccaagttaatgttcgtatcatcttcctcctttatttcacatctctagtggattacattgtagatattctggtgttggaaaaccctttcattcctgaaatacacttgacttggttgtgattattattcatttaataaattgctagattcgatttgctagtattgtatgtagaatactggtatctttctatatgtgagcttagcctatattttatatttcttttgctctcctcatttagctctggtatagggttatgctagcacagtaatatttgtataagataggaaatatttcttccttaaatgtctgatagaccctagccatagagtcataggatctgttcccttttggaaagtaggtctcggctagcatttcagtttcttctatagttattggtttatccaatctttctacttcttcctgggtcagtctaatgtgcaagcagtaatgtgtacaaaacagcttgatgagatatcacaaaacaacacccaggtcaagaaatacaaaattgccaatattccaggaatcccactggtgattcctcccaattactgtttattttctttccaaagtaattattaccttaatttcaatgataattatttccttgcttttctttatagttttatctcataaccgtggaaccccaaacacgacagttgttcttcgcatgtatttaaattttaaaaaatttaattttagtttttgtaggtacatagtaggtgtatttatttatggggtacatgagatgttttgatacaggcatgctacgcataacaatcgcatcatataaaatggggtatccatcccctcaaacatttatcctttgtgttacaaacaacccaattatactcttttagttattttaaaatgtacaattaaattattattgactataatcactctgtcatgctatcaaatactaggtcttattcgttctatttttttgtacccattaaccatccccactacccacagccacctccactacccttcccagcctctggtaaccatcctcctactctctatcactgtatttaaattttatgtaaacgaagttacacaatatttattcttatggactggtttgttccactcagcaacatggttttctcctgccatttcctgttttcagtattttgcagcagagtgcccaacatagaacataatcgcaaatattccactgcagaaaagaggtgctagtgcttaagcacaaacgggagacatgattattttgctttaaataaatacttaaacacagctcaggtcctgcaagtatctggactctaggtctgagtagtggagctgagtcccacttgggcccacaatgatatcatgattccccccttcctctcagtgatcaatacgtggcatcgagtgccaatggtcaaacgtgatcgcaatgagctccttttctagagccttccgcaactctctacggacacgactagccaggataaagaccattagaattgttcggtcagtggtccgtaacagttaagtattttaaggctgtccatggcgaaaccctgtctctacaaaaaatacaaaaattagccaggctggtggcatccgcctgtgatcccggctactcgggaggctgaggtgggaggatcacttgagcctgggagaagaaagaaagagagagagagagagagagaagtattcttcatgggtctcttggttttttttatcggggagacagatgcatttaggtgattttcttcagctcatcctgcaggaccagcaggtccctgtttctgaggaccacatgcccttgaagaaagctttgcccctttcctctctgaagatggtcctccaacaatcgagggtgcctgtgtactcgaggtcagcttctttgcctcgactgcatctgcatcccatccacctaggcaggcagatcatttgaggccaggagttcgaaaccagcctggtcaacatggtgaaaccctgtctctactaaaaatacaaaaatcagccaagaagggtcacacgtgcctataatcccagctaccaaacttaaaaaaaaaaacctctactatatcttctgaataataatttgaatattatttctttgtctcttaggtcactcatcagcaaacatatatagtgtgtctgccttaggtaaagtaactgaccaggttcaaagatgcctctgatatgaaccaaatcactgaccctcgcaaaacatgttgctttaagaaattgcctttgtatgagagtaatccctataggagcatcttaagttccttaaattttttcctctcaataaacccagtagtaattgtaccctcctgacagtcttcagagggcaacagaaattacttagagttaagaaattaaagtgagtaaaggatacaaattatttacaggataagactttatgtgcaaaatacatctataaagtttacttcgtcaaagtctgacctgtttgcttagcctctctattcttccctccatttcctctttccattcccacctttcttcttagtgccaatattttcctcaaacaaaggcttttctcattaactgcctgcattgctttgcctccagccctctgagtctgtgttctctttggtcattgttttccatcagcagaagcacagacacgctctcttctaagtattcaaggcatgcctgacttcccaagatgatcttcccaagtcactgaacgtaacatcaagaacttttgcacattttagagtacatacacgggaagccacatcccagaaatctacatggcaacctcgctaggtaactcttaactctgaaacccatttcagaaacactgcctggagttcaagggcagagctggaattatagttcaaagctttggggtggtctgttatgcaattaaccaactcactttgttattaatagtatcacgaatcattatgcaagccaggtgtgcttgtaagggaagcaccaagcactgcttcaaccatttaattatttatgacactttccccctttttaactaaagcatgcttgctgtataaattttgacaaacaataggtaacttaaacaccagccataatcttaccacatagatggtatcacttattatggcagcatgcacttccaggctttttttttttttttttttttttgagacagagttttgctcttgttgcccaggctggagtgcaatggcgtgaactcagctcactgcaacctccaccttccaggttcaagcgattctcctgcctcagcctcccgagtagctgggattacaggcatgtgccaccacgcccggctaattttgtatttttagtagagacagggtttcaccatattggccaggctggtcttgaactcctgaccttgtgatctgcccacttcggcctcccaaagtactgggattacaggtgtgagccaccatgcccggcccacttccaggctttttaaatgcattgctgatattatatgtaattttactttctgcttaaaattatattaaaagtagatttccatgtctgtaaattttttatatcattaaatggctgtaaaatatcaccttgaatcataaagaaatgaagttttccttttattagattgtaacttgtttccaatttcatcacaattgtaagtaacattgatatggaaatccttatgcatgactctgtctgtatttcagattatttccataggcaaaatatatatctgatacaggtcttgcatccagaatatataaataactcttacaaatcaattataaaaagacaaatgagtcaatttttcaatgggtaaaaaaaagtgaacagataatttaccaaagaagatctacttaaggcaaataaccccatgaaaatatactccacattagtcacctgagaaatacaaagtaaaaggacaatgaggtaatactacaaacactacaggctaacattttttaactggcaatacaaagtgttagcaatgatatggagcaactggaattctcatacattgctggtggaaatgaaaatgatacagcccctttggaaaacagtttatccagtgttttgtaaagttaaactacacttactatacaacccggcaactctcctcctagaaataaaatacaattctactcctcagagaagtgaaaatacatccacacaaaaacctgtatatgaatattcagagcacttaattaataatagcccaaactggccaggcgtggttgctcacacctgtaatcccagcactttgggaggctgggatgggtgggtcacttgagatcaggagtttgagacaagcctggtcaacatggtgaaactctgtctctattaaaaatacaaaaatgagctgggcatagtgacacacacctgtaattccagctacttgggaggctgaggcgggagaaccgcttgaacccaggaggcagaggttgcaatgagccgagaaacaacccaaatgtccatctactgatgaatggataaacaaacaattgtgatgtgtctatttaatgcaatatttctcagcagtaaaaatgaataagctaccgatacatgtaacagcatagataaatctcaaaagcagtgtgctaaggacagaaaccaggcatcaaagactacccactgtataaatccatttatatgatattttagaaaaggcaaaactatagtgatatttctagtttcctgggcttgggagtggaggtaagaactttttggaatgaaggaaatgttctacaccttgatcgtggtggtggttgtatgactgtatacatttgtcaagaagaattaaactgaacacttaagatgagtgagtttgtagtatgtacattgtacctcaataaagccaattaagaaaataagaaatggttctgatatatggttttttgggttttgtttgtttgggcagctgacctaaaatagaacctgaaaacagattggggaattcagaaagagaaataggacttgaagggtgtgggggatggtgtcaggacaatgatttctggttttggaagtgttaaggaggttgagttaatgagggcacagagagagaaaagagacatagagaaatatggggcatgatgggggggtctctactgcagcaaaaaggaaaaaggagagcaagaaattgagaaaacagtttttatacataggatttttgtatgtgttgcctattttgtctcaatttatttttatttttttctcttcattctcttggtctctccttttcctggggggtcttagacaccatgtgtaactattgcgtgcttccaaagttttccactaaacagaccacacacatacatacagacacaccacacacaaccaaatgttccccaaccccaccccaccaccaccaccacatacacacaaacacatacccctcacactaaaataaaacaaccaaaggagaaaattggagggtggaagcaaaccaagagacaggaaggtaaaatctggcccctgccttaaagcgcattagttaggagagttcactctcttggtcctttacattccgtggggagaagcagtagaaaattaccgggttattcactccgagtctaagcagctgaataggaaaatagctttaatagccctattaggacctgggccaaggactttttctttgggtttgttgtgaatgattaaaggttaacggtggcatttttctttcagcctaggggagacaaccatctcagtaatgatcctaattggatccaactggggaactccagaaagtttcagtaacaaatttgcaatggttctgggccttttaatatggattcacaaaagataatgaggttatcctgtcatttctaccctatggatgaggaaagtgacattcagacaggccatgggatctacccactccctcgtaaagaactggaggaccaacattagcaacaggacctcccatttggcattttgttttcagatgtgcctagaagaaggagattacagcttcttggactgttgaagcctgggttcttcttgagttgtgaagatatcacctaaatcctatccacattttgtgcaccaggtttgtggacgcctaccaccattcattcattgcagtggctcagagaagatgaaaacaggactctttggggccaatgaagatccccaacagagctcagatgaccagagtggactggcttctaccctaaatacatacaacaatacttcccactctgaccttgctcactttatacaacaccacacaactagagagtggcagagctgctgtgggaacccaaatgccatctgactccaaagccttactctcaaccaccaccctgctgcctcctattctttcctgaaatcttcagtatagtcattattatgaagtaaaaaaaaaaagaaaatgaaaggatggaaggaaggtagagggagcccctctatctccattctttgtttccatgaagaacctctactccattttcaggggagtgctattggtgtaacacactttctggccctctccctcccattcttgtcactcattctccccaaggaagaagcgatatgtggatgataagattggaagaagccactcttatgttcggtggtgtgctggtaaatgtttagcagctggctctggggcagagagaaagccctgaattgtagtatgtgccaatctccatggtgtaaaaacacttctaccatagctgcttccaagtatgtaaattgtacacctcaataaagccaatttaaaaagtaaagtcaatcagtttgtaaaactcttgagactttaacattcagtccagcaagctgttacctgccggatccagcaacacacaacccgtaacataacgagttgggtctcagctccccgctcttcacagactccagagttctctcccctttgtggggttcctcatccatccttccattgcttctgctgctgccctgaaggcatcaccgctctcccgtctcctcttggggcacctaactctcttaacagtttaggactttgaggagttttgcctttcacaaaaagaaagaatgggggaaaaacggttatgcctcagcagctttcgctgtctaccctgcagcacaaattccacttgatggaggaacacaaaggtcggactccctgccgtgaagaggagaaagggaaattcgaatatggaaggagctctactctcccttgctctgtcctccgcaagagaatggggcagaacattctttagtctacacctctgtcccacatgagttgccaaagaccacagtgcctggtgggtgacatctctccaggcttttgaagacatctgagcctggattttgagcacattcctgacctccctactgggaggctcttctccttcaaggtctgccttctgacaagccctagctctttcccacctccagtggctgggtgggccggggggtggggtaagggtggagatgtgggcacattctgggagccccaccagaaccccatggagtggagaagtgaccttctaaggaggggagcgtacagtttccggaagggaggaaggatgcggtgaggaccaaatgcatccatgcaggatttcaaatataaacgactctatagaatacaagcacctactcctggcaaccgaagccgaaggaagcctaagaatataagagacggggcttcggcgagggcacgtgaccgaaaactcacataacactccacctgccccagtccagccagcctgctgtccacagtgtgcccatcagtgtatcaaacctcagtgctttatttcctgggatcctggccgagctcccattaacctcctgtgttgtccccacagctcctatacatgggagagggcctgcgttgggccagatcccagagctggggcctaatttgtgatgggatgccctgggaggcaagcgtgcttcagcatgtacccaatcaatagccagacacccaggtccggaggtgcctgagtcggtcagcaggacgttgggcaggtctaggttcagaacctctgcagtttttcccttggcttccccggggcttgtccacaacgccccctgctgcccattcttggttaaccttgtgtcttgtggatacctcatcagatctgttcatgaagcctaacgcaaggtcctccctccagggtgacacagtgaagtcaagtaacagatgtggagatgctttggagagcttgaaacagaagactacataataacaatgggccagtatcataaagccaagattgaagaagacagaactgaatatctccctcatctgcaaaacttgccttatctttcagtatcatcctgtttcagtggacagaaatcaatccatcatatatttgagccctgctcttataaccaagttaaattttgcctaaaataaggccctgcctcaagcaaatcatggtttgttttttattttattttatttatttattttttgaaatggagtctcgctctgtcacccaggctggagtgcagtggtgcaatctcctctcaccacaacctccccctcctgggttcaagcgattctcacctcagcctcccaagtagctgggattacaggtacgcaccaccatgcctggctactttttgtatttttagtagagacggggtttcaccatattggccaggctggtcttgaactcctggtctcaagtgatcctcccacctcggcctcccaaagtgctgggattacaggcataagccatcacgcctggccaaatcatggtttagaaaagggagatggtcaaatataattgttatgactgccatagtacctactatgtcccagataatttgcctaggtttttaaccctcacaacacatccctaaaacattgtacagatgcaaatgcagaggcacgaagaggcttaaaacattcccaaagtcacatagttactataaagccagtaactggctctatgtctatctgagtccaaaatgtgttttgtccccttctgtgcctatgcacagagggcagtgggaacataaatggaggtggagggaggggtaagaaggagacatcagtggtctaccctctttatgtgataacagactccctcttttatctggcagctgctccctcaagaggaatacccattctttcttcctaggtcaagaaagagagtccaaggcatggtcaatcacaacactgtccctctagtcatgggccaagtgctgggcacacgtcaccagccaggctactcttagcctttcccataattttaataacctgagactgggagaaagaagcctcactctctcctggagtgatcaaactgtatgtaagtctagagttctctgtgagtacagtctcctctagcaagaaaggatgagaccaactcataataagaagccaaaatacatgtacatatgagtaagagagagagagagagctgacagcattgtttgggtgtctggatctagccattcctgtggtggctctgtctagtccttacttaaatgagttaatacatccccttttaactgaagctagtttgtgttgggtttctgtcccttaaagtcaagagtcctgagaaatacaatactggtcaaaaaaagtcttcatagaacaggtgaaccaggaaaaaagggattcaccagaaagataagaggagaggcagagggtgaacgtaacagcagctgcactcgaggaactgcgagcagctcaggatgacttgagctgagatgtgcagagggggttggagagacgggcgagagccacatcagggaaggccttgtttgtcaggttaaaatgtttggtctttatgtgagggcgacagggagcccccaaagggtttcaagcagtggtgtgacatgctcaagctcgttttgagaagatcactcgggagaacgggtctgagagacagcacaacaggagggcagcggattagttatgaggctgctccgggaatccaggtgaagagctcaggatggaaaatgactcgacgtttttgacttggtcattggccagaggggagggcaagaacgaaaagagttgtgttttgttcatgtgcagtttgaagtaagtatcatacatttaaatggaattgtccagtaggtttactaaaagagatgacagagttggcgatgtttaagtttttctgagtcatcaattcagctgtttgctgtctgcctactactggccaagcactgtgtggaggagaacaccgtccagcctctgctccctggcatcacactgtggcaagacaaaacagatgataaccagagaaaccaatcaagaaacaagggaagtgcaggggagaccgtaaagcagcatcgtgtagcagaggggctggggtgggggctccatctcttcagtggtcctggaaggaggagctgacgccctgagggtgcaggaggtggctgaagatgaatattctccaattcatgcccactgaataggaacatgcccatttaaaagcatccatatgcattttgtttggcttgttggttttctttgcctgcctatgccttcaaagctggcattgaggtggcaggaggcttctgtgcagaaaactgaggctggtgctggaaaactcccaccatggcccctttgttctcatccagtgcctttcatcccacactcccaaagcccatcctggcgcccaccctttaattgtcaggcctggctcatcgacacaagcaggtggcatttgatcattattcctgcatcataaatgagggtaacaaaggcctccctctccagggtatcagccaatattattttgtgagttcaagggatctgactttgagttgaagcagaaaggcctgatgtcccatccttttcatttctggaattacccgtcgctgcatctttctgttaccgccatttcctctttaactccacgtatctaactggaaactttgcttttctttgtttcatcttctttggaatatgttgttccctgtgacccctccccacaaagccttgcctctgcagcagatgccctgagccttcctgatgcctgggactggtacctcatccagtttgcttgtttcaggcactaactaaactagaatgtgcctggatccctatgggccttggctttctaccagatgacaggcaaactaagagacgtacacaacctatgcactcccttccctctagaatgtttcagcaggggtcctctaagtaagaaagctggaattaaaaggaatagttttaatggggaaaccctggctagggagatgcttgataccctaaggctgtatgtctagctaggtcaggcatagctcagtgcggtctgcatttcatagcagatgtttagtttggaaagtcccctggctacttggcttctagagccctctctcaccatgggacttctctgtgggaggacagaactcatcaatcacattctccaaatgtcaagttcctgctgtgtaaccccaggagaaccttgcttcccatctacataacagaagtgaggaccccagatttgctagacaaaagcttgaacctgtggggaaaggtccccccagctggtcagaattcccaaagaaggctaccactgggagatggattgcaatataaatggcacccccaccctctggatgtttgtcatttcacccttccttctttacctgacaatctcttaagagattcttggggggatgtaatacaccagccaggaactaaattatattcaactttctcaagtagatactatttcagctacgtttgggaaatgcttagccagaatttgaggtcactggaagaggtcatagaatcactcaggttcagacttgtggaattacttacactttccagaacctgtcatgacttctttggctccagggctttatacctgctgcttcttgtgctttggggtttccttctctcccaccagccctatccacagcacacacatgcatacacaaacatgtacacacgtatacacatgcatgcatgcacatgcgcacacatgcacacacatgcatacacaaatgcacacacatacatgcatacacacacatacacacacattcacacacatgcatacacatacgtgcatacacacacatgctgcacacatgcacacacatatacatgcacacacatacatgcatacacatgtgtgcatacgcacatgcatacacacacatgcatacacagcatggcctctgcttgtccttccagagtctcttataaagcttttcctgatattccaagtctcaagctagctaccctccttttttttttttttgtgactgagtctcacactgtcacccaggctggagtgcagtggcacaatctcggctcactgcaacctccacctcctaggttcaagtgattctcctgcctcattctcccaagtagctggaattacaggcacctgccaccacgcccagctaattttttgtatttttagtagagacaaggtttcactatgttggccaagctggtcttgaactcctgaccttgccacacccccatttttacagttttctaaccattgactattttccagtcttttttttttttttttttttttttttgaggcagggtctcgctctgcacccaggctggagtatgatagtgcaaccatagcacattgcagcctcctgggctcaagaaagcctcctgctttcagcctcctgagtagctgggactacaggtatgtgccacaacatccaagtaatttttaaaaattattattatttttttttgagacggagtcttgctctgttgcccaggctagagtgcagtggtgcaatctcggctcattgcaaactctgcctcccgggtttgagtgattcttgtgcctcagcctcctgagtagctgggattacaggcgcccaccaacacacctggctaatttttatatttttagtagagacaggtttcaccatgttggctgggctggtctcgaactcctgacctcaagtgatccacctgcctcagcctcccaaagtgctgggattacaggcatgagaaaccatgccctgcctaaaattattttttgaattattaattatacaaaaatcattagttaaaaatcattaaattttgtatttttagtagagatggggtctcactatgttgcccaggctggtctcaaactcctgcttaagtgatcgtcccaccttggcctcccaaagtgctaggattacagacatcagtcactgtgcctggcgaagtctttaccaattggcaataagctctctggttgtcattacagttccaacgtgccaggcaaccagtaaatgatcaataaatattggcattttgggtgaatacataggtcattagtgctactgttctgctttgactctcattcagattaggaacgagctccccctccaaataagcaagcagactagagactatttcctgagaatgtaattccgattcaattcagaatttgtttcatatgctcaggacttggccctcggagggctggggagagggaaacaagcaatactaattgtaatctctgccttcaattttcccctttttgaacatagtactagtgttggccacctctctgcactgcttcaaatccccccggtccctcctctcgctccatcagtgccttggtgaccactttcacgcaggctttgccaactgcacatgttcaaaggctcataggtgaaagagcacagtgcatccatggaacttcaagaaattcaggggagctgaagcaaagttcattcacggtggggaggagcagaggcagtgaggggaagaagtgaggatggagggctctgcatgggatgcagcatgaaggaccttccaagagtgcaaagttatgtatcctgatggcaaggggcagccatggaagattttgagtagggaagtgacttgatcagatttatgtttttaaaagattcctcttgctgcaatatgggaaattgaccagagggggcacagctggaggcagaagtccagttggtaattagacattctcaatctgcctatatgtgaacatcattaaagaaatacccagaggaggggtccaaatgtcactttttttttcttccaggtcccctcagtgattcctgtgtgcacccagggttgagaactactgcataagaggtcctagaagatatctggtatggccagagtacagagggaccggaggtaagccaggagagacatgcagagcaaagagttgaggtctccatcttctgtgggcagcatctggcctgttctgcttcctctgattctcaccaaagtgttggcccaaatgatttttaaatttgaattcattgccattattaaacatatatagatgtcacacaaaatatccagatttctgctcctctaagaaacttgggaggtctggccaccctgggcctgcatgcccccatggcaataaatcaagccctggctgctgcttcacatgtggcatggactctccgagctgccacagcccggccactctttgtcagttcccaccactgcagccaaaagccagctgctgtttttcatctcttacccagcctgtttgctcatttaagctaattgtctagtccctgttgagattggagtttagatctcaaaagctagactctacagggtgggtaggcctgttaatgattttgttatttaccctggaagcactgcaaaggcattggaaggtttcacgtagagcagcaataacacaagcaaatctgatgtcgaaagatcactctggctggccttggtggctgatgcctgcgatcccagcactttgggaggctgaggcaggaggattgcttgagcccaggagttggagacaaggctggcaagaccctgtctctacaaaaaaaattgaaaagttaaccaggcacggtggaacacgcctgtagtcccatatacttgggaggctaaggtgaggattgcttgagcctgggaggtagaggctgcagcaagctgtgatcatgccactgcattccagcctgggcaacagagtgagaccgtctcaaaaaaaaaaaaattactctggattgtttaaactccaggtaagcagctatttgactagacaataaggacaaatcaagacctcccccagtctcctctggctcttttatagaaaaacctttattatattcctgtagttaattttcagtaagaatggatattttcaccaatattttttgtcagaaataacaggagaaacagcaagttaggatgaaaatggaattgaactagatggtgaaaggtttggatttgaatcctaagtgactttgacactgattcttttaccttggctatcctcttctataaaatagaaataataatattagactctcctaagtatctcacagggtcattgggaagattaaataaaaaaaaatgaccagtgttttataaccttcaaagtgattcatggatgtaaaatattgttatcattattcatttatttaccaaactcacacccattcctactgtgtatttggcctgtgctaagtctggggatgtaaaaatgaatgagaccaaccttaaaggtctatggtctattggaagtagcagtgatgtaaagacataattataggtatatactcaaaagaatttaaaacagagactcaaactcacgcttgcatgccagtgttcacggcagcgttattcgccatagccaaaaagtggaaacagcccaagtgtccatcaacagatgaatggatcagaatatggtatgtatattcaatggaatattattcagccatataaagcagtgaagttctgacacatgcggcaacatggatgagccttaaaaacattacattaagtgaaataaggcagacgcaaaaggacaaatattatatgattctacttgtataaaatatcgggaacaggcaaattcatagagacagaaaggagattagaggttactagggtctcgggggaggtaggaatggggatttactgcttaatggatacagactttctgttgggggtgatgaaaagttttagaaatagtgatgatagttgcacaacatcgtgaatttaattaatgccactgaatttatgcacgtcaaaatgtttaaaacggcaaattttatgttatatgtatttaactacaataaaaaatagcaaaaacaaataaatgggtcagagttcaactaaagacaatagaaaaaagcgcagagtaaacctaaagaaagaataatgaaggaaataggccgggcatggtggctcatgcctgtaatcccagcactttgggaggccgaggtgggcggatcacgaggtcaggagatcaagaccattctggctaacatgatgaaactccatctctactaaaaataccaaaaaatatatatatatatatatattagccgggcatggtggcacgatcctgtagtcccaactactagagaggctgaggcaggagaatcgcttgaacctgggaggtggaggttgcagtgagccgagatcatgccactgtactccagcctcggcgacagagcaagactgtctcaaaaaaaaaaaaaagtataatgaaggaaataataaagataagagcaaacaccaatgaaatagaaaacaaagaaacaataagctgattcagggggaggtaaaagctactaaataaatatgtagtaattataataagatgtgctaaaagatgcctccaaagtgatatgaagaaactcctgaactccagaaggcttcaaaaaaaagacaagctttttgcagtgtggactaggggaggagagcaggcattttctagggcaaggatgtggtgatgaccatggagtctgccaagcagagagactcttgttctagtcaccattgttccctcttcctagtccaatgtctccaaccagggtacttaggaaatgttagctaagtgaataaacattttcctttagttctgcagtgtgtcttttgtctatccacaaattttatgacataaaatttcttatgccgtttatctataactttggatgtccaatcccacactacagtcttttatgacatagctgtgtgatgctattttattttgttttctttcttctaatagagacagggtcttgctatattccccaggctgatctcaaactcctgggctcaagtcatcctcccacgttggtctcctaaagtgctgggattacaggcatgcaccacccactgcacccagcctgtgatgctattttcctaaagacactacatgagaagctcctaccctttctccatttcagctgcaagaggctttcaaaacctaggcccgaaagctaaaaacttctgaactgttgaaatggggccgggcgcggtggcgcacgcctgtaatcccagctcctcggtgggctgaggctggagaatcacttgaacccgggaggcggaggttgcggtaagccaagatcgcgccattgcactacagcccgggcaacaagagtgaaactccatctcaaaaaaagaaaaaaagaaaaagaaaagaaatggaaatccacatgcaacaatggctatccaaataccttaaggatacatttgagggtgggtgtacccatcttgtgccccatctcctagaaactggtgtttgctgtgggcaaatgaggtgccaggagaaggtactattgctgcctaagggctgcagcacatggtcgtgcaggttgtctactgtacaagagttcctggcagaagcagggagggccgctgaaaaacagccagtattccatttaccaagtcgtgcaccctggggcttcatccccccatataaaagaagactttttctaattagtacaaatacgtcaggcaggtatgggctaattgcagccttgtgtccccagctgtcaccattactgtcctggctaggggagatttagtgtctgactctgtcccttcaaaagagccccctcaattctcttcagtgtcaaagcatcttttcagaagatcctttcaagccctttggtgagtgactaacccaccaccggcagtccactagtggagaattaccttctgccaagagaccttagttctgtaaaaaggcaaagaaagaaagataagctggggcaagaaagaaagataagctggggcaagaaagaaagataagctggggcaagaaagatgaactcattcggccacgctgctctcgccctgtggttgcttcttctgccactagatggcgtcctcgcctaagtactggaaacactttcctgaggatggaatttgagaggaagctgggttgcagccgctgtccgtgtggaacgtttagctgatcccagcttcattattatgcgatttgaaaatacctgctcatcctgtcaagaaattttattgagtggaataattgtttcatggcactcgtcaagttcatgcacagcctgtctccttttcttctccctctgactcctgcagtcagccgatgtttaaacccaggagacgcaggtcaagccacagggagctcagcttcctgacatccacctgagaaatgccaggagggcttactgataacataatggatgtcagtttaataaattctgactcaaggtgacatatagctatttacagagatataacatattaacatatatattaacatctatcattttagcattaatcatttcggcatctttttatttgaggcatcatttatatatttaaatgtatataaatgatgccccaaataaatataccatatacttaaatctataaatatataaatttattatttatttatatataaatacatggtatatttattatttatatatttatttattgtatatttatttaaatatatgaatgctgccccaaataaatataccatacacttcaaatgtgtgcctttaaatgtatttaaaagtgtgccttaagtgtacggttcagtgagtttaataaatgtatacaccagtgtagccaccgcccccattaggacacagaacacttccatcacgctggtacatcgtcttgtccaccttcaaagtcaattcccatgagctgaagaggctcaaggctcagagaagagcaaacagtgggtgaagggagtgtgtggccttcaggctaatgtgcactgtaagaggctaaatgagactcttgatcactcacagcctctgttttgtattttcctagaaaaatcaagtaatcatttatttttaaggaaaacaatggcattttaagagccacctcattttacctgacattttattagtttttctttcacatatataaatgcacaaaattctgtaaaatatgtttagtcatcacttcatgatttggttcttgtgacttttttttcactatgcagttgtcaggatgcagctgagaaaattatcagagctattcagtgagatcaattgtgtattttgaaaataatttttcctgaagagcctgatatggttttgctctgggtgctcttgggtgtccccacccaaatctcatctcgaattgtaatccccaggtgtcgagggagggacctcgaggtaattggattatgggggcggtttcccccgtgatgttctcatgatagtgggtgagttcatgagatctgatagtttaaaagtggcacttcccccctcactctctcctgccaacacgtaagacgccttgcttccattttaccttctgccataattgtaagtttcctgaggcctccccagccattcagaactgtgagtcaattaaacctcttttctttataaattacccagtcttgggtgttctttatagcatgtgaaaacagactaatacagggccaatccaagcattcttcagctcaggagtttaactcatttgtcagcttacactagctgtgtctttattactatgctagaaaaatgcgatgatttcgcctaaaagattgacttctttaatataaacttttaatggaagcataacatacatacagagaaacacacagctcaatgaatttgccaaaagtgaacacaaccatgtaatcagtgcttagatcaagaaacagaatattatcagaaccccagaaacccttctagtcaccccaagggtaaccattatcctgacttttaaaaccatagatgaattgcacttgcttttgaattttctatcaataacataaaataagaagtactgttgtgtgcctggctttcatcacacaatattaacatccacgttgttgtgtgtacttgtagtttgatatttctcttgctgtattgtattccattatgtgactatgccacggtctattcatttcacacacacacaagcaaatatatatatatacagggtcttgttctgtcgcccaggctggagtgcagtggcatgatcctggctcactgcagcctagaacttctgggctcaagtgatcctcccacctcagcctcccgagtagctgggactacaggtgtgcaccaccacgcacagctaatttttttagacactggctctccctatgttgcccaggctggccttgaactcctgggctcaagcaatcctcccaccttggcctccaaaagttctgggattataggcatgagccactgtgcctagcctcgtttcactattgatggacatgtaaattatttcggttattagttattacaaataatgctcctataaaattctttgaaaatgtcttttcatgaacactgttacgcattgctgggtcataggacacacatttgttcagcttaaattgatgctgccaaactgtttctcagtgtggttctaccaatttacatccccaccagcagtgtatagagtagcagttgctccaatctgataacatttggtataactagtctttttcattttggacattctggtgtgtgcagcagtatctcaccaggctttgatttgcattgccctgaagactaatcaagttgagcatttttttttaatgtgctatattggctattttgatattctgttttataaagtgctgttgaagtcttttaccaatttactgcaaaatatttgaataggcactttacaaaaatttaattttttctttatttttagttattcattttgagataattttagacctcaggaaaaagcctacaaaaaatcttgtgtttccttcatctggcttgatatctcgatatcttacataactgtagctaatctcaaaatcaagaaattaacattggtacccatcttcagagcttattacgattttaacaattgtctcgctaatgtctttttctgggccaggaatcaagccaggatcacacattgtatttacttgccatgtctccttaagtctccattaacctaagtcagttcttcagtctgtctttcgtgaccttaacgtctttgaagagaactggccagttagtttgtaaagtgccctcaatttgtatttgtctaaaggaaacactcaagttaaatatggttatggatctttgcaagaaataatgtatccttctcagttcatatcaggaagaacacaatgtcaatatactttatcagtggtaaagttagcttggatcatttggttaaggtggtatctgtcttgtgtctccactgtactgttactattttatttctcttgtagttaataaatatataatgaggcaatatgtaaatatcctgttcttctcatgcttttgctccatagtgcttttacttcgttgcttctctatatgatcttgctatgagcccttttttgatacatgtattgtaaatatcttatcctactctaagtcttgcttactcactctcttagtgtcttgatgagcagaaattcttaagtttaatataactgaatttatttatttttctttatggttagtcttttttatgtccagtttaagaaatcaaaccttcacctaccacaaggtcatgaagatattaacctatgtgttcttctaaaaatgtgttttccttttcatgtttgaatggccaatctatctgtgattcattcttatttaaataggtatcaaaattcattattttttcacatgatatccaactgatctagcatcatttatagaaaagtctgtcttttcctcactacactgccaactttgtcataaatcaggtgaccagaaaggtgagggcctgtttctgccctctgtcttccattccgtttgtctatttctctatctgtatatgaataccacactgactttaagtgtcatattgttgagtcttgatagttttatatctctggcattgatctttttcttcaagatagactttgctctttttgtcgtttgcattttggtctaaactttaggataggtttgtcagtttctatatacatacctcaaactcttgatgagattttttggctcatttgaatttatagatcaatttgggagcattacatatttaccatattaaatcataagtaccttcctccattatatcttctttatttttctcaataatatttttcttttttgagatggagtctgctctgtcgcccaggctggagtgcagtggcacgatctcggctcactgcaacctccaccacccgggttcaagcaattctcgtgcctcagcttcccaagtagctgggactacaggtgcaagctaccatgcacagctaattttcacatttttagtagagacagaatttcaccgtgttggccagtctggtctctatcttctcacctcaagtgatccacctgcctcagcctcccaaaagtgctgggattacaggtgtgagccaccatgcacggccctcaataacgtcttataattttcagtgtagtggtcttatacaacttccattgatttattcctaggcatttgatgtttgacaatttatttttaaaacatgactacacgagaagagagtaacatagagcagtggttctcaatgggaagctatttttgtcacccaggacatgtatggcaatgtctggagacatttttggcacaacttaggggtggtgctacaggtgtctggtggataagcagaaatgctgcctaacatcctccaatgccaggacagccgccccacaacaaagaaacatccagcccaaaatgtccacaatgctattctcgggaaatcccaggataaagttaagaacttccagaaagatatcacttcatagtcattatttttatacactgttcatggatttttatatttcacacgaagtgatttacagtgacattttcatcatattagtttttattactggggtgtgaataaaatgtactgtgttcagtttataaaaagatgttataattgttgggagataattctccatggcttctgtgtttctggaaaccttctgagcaaaaggcattgacagtttgattcacagatatttgcataacagacagtcttggaaagataaagatagtgactccctgcaaagagatttggagctgcctcttcctgagatattccagggtaacagagctagagaccgtgccctttattccctgaagatttgcttacattctccagggaggggccaggcacgatggcacacacatgtaatctcagcactttgggaggccaaggcgggaggatcgcttgaggccaggagtttgagaccaccctgggcaacatagtgagaccgcacctctacttttatttaaaaaaaaaaaaattctgttttttaaacccaggagggctgggcatggtggctcatacctgtaatcccagcattttgggaggccaaggtgggtggatcacctgaggtcaggagttcgagaccagcctggccaacatgaggaaaccccatctctactaaaaatacaaaaattagccaggcatggtggtgcatgcctataatcccagctatttgggaggttgaggcaggagaattgcttgaacctgggaggcagaggttacagtgagccgagattgtaccattgcactccagcctgggcgacaagaatgaaattcagtcttaacaacaacaacatccaggaggataagcaaatttgtgagcagtctccttctaagatgggggtttctgaggttcaatgttcttcagctgtgacatagacccactgtctgctcagtatccacctgggcctgcctccacatggcccctatgcgacttggaggtaaaagagaacctacgtaaacatgctgctcatgctgccagctgcactgtaagaaactgtctaaatctgtttgggtgtgttttctccttactggttgaatctatggaagattggtaaattgacctaacagctgcagtaatctctgctgcttagggattgcttgataatgacccattagcaaggcctactgccaatgtaggaacgggaggaggcactactaatgtcatatattcgctttctccatccagtagtgatgacagggaagtgctgctgggtaaggcaaaattatgtctccaccaacagttccccaaacctgccttttaggtcgatgggtttgaagtgctggccctgaggagtgctggcctcaagaagccaaaagccacgatgtcactatttatattaaaattcatgagtttgttgtagtcaccagtaggcctccctgtgtctaccaggatgcagaaggtaacaacatagggcctggttccatcccactcaatgtttgagacttatttcctggaggctgggtcctagttttattcttggggtctggagtctcctgcaatgactgggtctttgttaattaacttcagcacaactggctcccttcccttcttgcatgaggcttctcagacctctagtggacttttctatccatctgccagacctacccagacttgctcgaacttagcagtggccacaaacttagctcaagctgaaagctctactacaaaaacctgtatgaaagagctgagtgatgatgctgactctcgccctggactatttgcagctgctttgtttttgaaaatagccaacttaactgcagtcacttcagcgcaatccacatccacctagagtatttgtgaaaacaaatgagaccatgttgacccctatgatcagagcttattttcataatgatggcttggtttgatgacgcttgaatatgagctgcggctcagcagcagaagggcacaacctcaaaaagcagatgttttttaaaaagccaataattgaattaaaaaaggcttccttgtcagctgtcatgcatctgagtaaagggtggggtaggacacttccttggaagcaatgatctgcaaatgcattatttgactgtcaaactatgctgaactttatactgatatgatgcaaatgatgaacctccctgtggtcaaataaggtttctctttttgttgagctgcagcagttcatggcaaggaaaacaggttttggggaaggaaagaaagggtgtcgctcctttggggcaggaaaaaacagaaataccaaatgctgatgctatttcttagttacattttcttttctttcttttttttttttttttttgagatggagtctggctctgtcgcccaggctggagtgcagtggcacgatctcgactcactgcaaactcctcctgggttcatgccattctcctgcctcagcctcctgagtagctgggactacaggcgcccgccaccacgcccggctaattttttgtatttttagtaaagatggggtttcaccgtgttagccaggatggtctcaatctcctgacctcgtgatccggccgcctcggcctcccaaagtgctgggattacaggcgtgagccaccgcgcccagcccttagttatgtgttctgtagaatattagattttacccttgatgggagtggggttgtgggtgtcgctcgctgtgtctgtagatcaggtaaacgagaagttctgagaatatctaatatctgatatctagaagtgatataaactgggcaatacctcttcccaaacagcagtagagttcatcgagtaaagagtattacagtgttggctgggcgtggtggctcacgcctgtaatcccagcactttgggaggccaaggcaggcggatcacctgaggtcgggagttcgaggccagcctgaccaacatggagaagccccgtctctactaaaaataaaaaattagttgggcgtggtggtgcatgcctgtaatcccagctactctggaggctgaggtaggagaatcacatgaacccaggaggcggaggttgcagtgagctgagatcgcaccattgcactccagcctgggcaataagagcaaaactctgtctcaaaaaaagaaaaaaaaaagattactacagtgccaaaagcggaccttagtcaagaagcggtgctgatcgaagtcatgttgcttatcagttaccttgctatgccatacattatttagaggcccaggttggatgtggagcaagctgtgggtgccaccttttccttggagaccatgatctgtgactttcttaaggtcaccagttaggaaatggtaaagttgagattcaaactcctatttttattttggaatttagtgaggttttctttgcaaataaatatgttgtcagtttttgtaaatgtttagtagacaactgaaaaaaatagcctttaatagtaaaatgaagcattattaaaaacgcttgttcttgtagatagagtaaattttcatctttagggatattgaggcaaaatgtttatttacttaatgaaaattaacatctgaattagtcttaagatttactggaaaataaaacatgaagaattattggtgttaagctattaatctgctataacagctgtcatcttagatctaacaccagaaaactgttggtaaaaatctgcaatttggctgggcctggtggctcacacctgtaatcccaacactttgggagactgaggctggaggatcacctgagcccaggagtttgagaccaatctgggcaatatagtgagaccccatctacaaaaaatagaaaaaattaggtgggcatggtgggcatgcctgtggtcccagctgaggagcccagctcaggaggctgagccaggaggatcacttaagcacaggaagttgagacttcagtgagcagtgattgcaccactgcactccagcctgggtgacagagtgaaaccctgtcttagaaaaaaaaaaaaaagaaaagacaggaaaagaaaataaggtgttttctgtgaactctagtccagttcataaatattaattctgccttatgaataataatattcagatttgtccatttttggcctgttttaatctatgaaagacaaagcagaagctgtttaaaatttacttttgcttcatactgtaaaacttaaaaaatactttcttctttgacctcttaggtgttatgttttttatgttcccgaattttttttacagttctatataattttttatgcttactcatccttgaaggttgaaaactctatccatgctttgcatttgttccaatatgggatgagctattttttttttttaatctggccttactgaatcaatgagctaattctttttggctccctgcctgtctattttgatgctcttagaatcttcctctcattatcctaggctgcagggttgggtaccttccagcagcttgaaaggatggtggaggaagccatctggcaaggaaagtcaccctggcaaagtttcttctcaaggctttgctaacccactgtcccaaggagccaaaggttatctggcctctagtctctcctcctcactggccagcagccagactggacgtggcctggccatcctcctgagactaccattgccaatattgtaacagtgagagaaatcgaacatagctgactccatcttgcttctgacctcacaagctaactgccttcgtgcattcctgcatgtagactaagctaatcatggaaagaatttagattatagtttaactgtagaactaatgattacctctgttttgaaatagacccctgaggagataaggaagtatgcacacaacatttaaacaatgctgtcttgacgatttatagcaataacgtggacctgacaagcatttgaccatgaacaaagaagttttgcaacctccttggagccctgctgatgcccagatgtctgtggtcaccagtcacctctagaccttaacccctctctgttctcccttcccctaacataaaaggagccaaaaaaatccatgaacttaagatgattctttaggacactaggccaccattttctcagtttgcttgttccccccaaaaaagtcatcttccagccgggtgcagtggcttaaacctgtaatcccagcactttgtttctccggtttttgagataggaggggccctctagtagtgtcaacttgagtatagtgtacccacagttttattccagcaaacttcactgatgagtgggtattcagcaacatctcaaacaatcccattcacttgttccttctaggtgtcattccacagtcaccccttgtcaaccctgcccagttccactgaaagtagccaaatgagagacaacatcctgttgtccccaactccacaagattatggaatgaacctttgatactggggaattgtaacagtgaaagaaatctaacatagctgactccatcttgcttctaacctcacaagctaactgcttttgctcattcctgcctgtaggccaagctaatcatggaaagaatttattttatattttaactgtagaactaatgactatctgtcttttgaaacagacctctgaggaggtaaggaagtatatacacaagtaacaatgctatcttaaagatttataggaaaagggtggatctgacaagcagttaactatgaacaaagaagatgtgcaacctccttggacccctgctgatgcccagatgtctgtggtcaccagtcacctctggactttaactccttccctgttcccctttcccccaacataaaaggagcctaaaaatctatcgacttagggtgctttagaacactagtccaccatcgtcttggtttactggctccctgaaacaaagtcatcttccttgccccaacaccttgtctctcaacttgttggctgctgtgcagtaagcagtatgagctttggactcaactgcagtatcagaggggagacttgccactctgggaaaaaaaaaatcccctatttgcatgtcttgggccatttcagtgagtatttagagaggagattcagaagtctaggctaaaacccaattttacctggcagtgttctgcttgtctatcgctccaaaaaataacactcaaaattcaggggtgtgaaacaatcacaatcatttattattatctctcatgattctggtgattgactgggctcagctagttagttcccactcagaatgtgtcaactggctaccatgagacagcgatcatactggagtggccttgaaggcttcctagtcacatgtctggcactgagacagggaaaactcaaactgctggggcatgaaacagccaaagctccttgactctttattttcatgggttctatttacatgatctctgcaacatggtggtttcagggctgctgtacttatatactccaaaggcacatgttctgagcaagagagctaaccgatgcctagagctagatgaccaggtctccttttaagacccagttttgaaagtcacatagcattactttggttgtgcagtcacagaaacccatctaagaagcctacctgggttcaaggggaaaggacttagatgccacctcttgattgaggtggggggcagggtttttggaagagcacatgggactgaacatattgttgctgcaattctgaaaaatacaatctgcagcaggaagtttaatgcaacttgtagaattaataaatgattgtataccattaatagtaacacttcttgacacctactctatgagagtatctaactcatcgaaccgtgtgaggattaaatcattaatatcatatatttaaagcacctagaatactgactggcacatagtaagtgcacacagtaagtaaatgttagctgtactctatagttaagaaaaattagaagtctgtaactatagtattaactaattacccttccccatcattcaattctcagttgttcattctgctattccctttttttagaaaaaagtttcttggtttatgtccttgtttaggtggaaaagctttcaccatctgaaaacttcttaagaaaaggtacatgggagataaacattttgaaattgtacgtgtctggaatatatttacccccacatttgactgctaatttgtatgtgtatgagaatctatgttagaaataattttctctcagcattttatttacttatttatttaatttatttagatacagagtctcgctctatcactcaggttggagtgcagtggtgccatcttggctcactgaaacctccagttcccaggttcaagtgattctcatgcttcagcctcctgagtatctgggattacaggtgaccaccaccacgcttggctaatttttgtattttttagtagagatgggatttcaacaagttggccaggctggtcttgaactcctgtcctcaagtgatccactcaccttggcctctcagagtgctgggattacaggtgtgagccactgcacccagcctactctcagcattttaaagacattattccattgtctttcagtttcatgtgttgctactgagaaatcagatgccattccgattctggatcctttatgtgaaaccttatttcctcctgggtacttgtaagatcttccctatgtcctcagtcttctaaagttttatcacaatgttgccttggtgtggttctggttttgtccattgcactatgctcagtgagcactttcaatgtggaaattcatgctctttagttctcaaaatatataattgaattatttaattcatttcttcccctgtttcccagatgtccaaggctggctttctaatcttcttatcctttcttatttctttcccttctctttgccttctgtctatgcattctaggatattttctaactttatcttcttaacattctactcagttttttatttttgctatcagatttttaatttaaaagagctgtgtttggttctatgagtgttccttttttagggtatttatttatttacttattgagatagtgtctcgctatgtcacccaggctagagtgcagtggctgttcacaggtgtggtcatagcctcaaactcctgggctcaagttgtcctcctgcctcagcctaccaagcagcagggactacaggctcatgtcatcgcacccagcttttctgttttatttgatctttctcagagaagatcaataatagatttctcagttttcttctccccctatactctttttcttccttttctcttttttcctgttagcatgttttgggttctgtttttaatgtcagatccttcccctacattgtgatgaccttcagctgcctgctcttacttaagtgtgccagatttagcaacaaaaagaaagaaaaaaaagacaggacatctggttaaatttgaattttagataaacaatgaataatttttagtataagtatgtctcatgcaatatttggacatacttatagtacataagtattttatattttagtaaaacattaattggtgtttaactgaaaatcaaatctaactaagtgtcctgtattttatctcgcaaccctaagagtgaggtctacaaagctgcctggaagccctgagtgcgtgtgtaagtgggtggggcttgacaagggtgagtttaccaacaggttgctccagtttcattgcataaatgattacatctcttcaggtctttcctcttagattccccaaagaaaagtattccaaactctccagcctggtgagtttgaacttggctgccagagttctaggagccaagcgggaagaataccaagcagctcagtaggcatcatcttaagtttcatatggctcttcaatttcagtacagtagccctagtcttgtgttaatctcatggccttgatgaaagatggctgcaaattctttgcaccctcccacccctccccactcagggatggagcctaatccccttcccttaaatctagactggccctagtgactggcatgatttatagaatgcaacagaaataatgttcaacagcttccaagcgtgcataagaaggcttgtaacttctgcctggatgtcttggagtaaactttctggaaaccctgagcctccatgaaggaaatctgaccctgagcctgccatgtgaaggggcatgtgtagatgctctagttgacagtgccagttgagaccaaccttccagctcttcttatcatggtacccaatatgtgagttctccagactggcccatctgccagctggataacaccaagtgacctttcttgatgccaggtggaatagaagaattgctcagttcaaattcagacccacaaaatcatgagatataatggtcactgttttatgtaaccttcaagtgttgggatggttttttaggcagccttagataaccagaacacctcaactacatctgatgtccccattccagagagccactgcatgattcttcagagaacatccttccaatcatccaccctcgtggaagagggaccgtggccactgtgcagtgttgggaatgctgactgcttcttgtacagacttacaagaaatcgtcctgggtttagtctcacctacacacccactttcagacacatccagtgcagcaaactctcctatcccgagaaatcctactgtcatgttgcttctcggttttccctactcctggtttggaagtcggctttctgaggtctgttaagtcagttatcacctgtccacgtgctttccaggttccaaactcttattatttttcctctcttgttcccttgtccttgtgagatttttaatttttttttatttaaaaaagtggtttttttaggggggtggggtggggacagagtctcactctgtcacccaggctggagtgcagaggcatagctcactgcagcttcaaacccctgggctcaagtgattttcctgcctcagcctccccagtagctgggactagaggcgtgcgtcactaggcttggctaattttttttttttttttaaagagacacggtgggtgggagagagagtctcattatgttgcccaggctgatctcgaactcctgacctcaagccatcctcccaccgcggccttccaacgtgctggtgttacaggcgtgagccacagcacccagccctatctttaatttaaaggctccttggagtggaatttcaacaattatattaattttttaaatactcttagatcaggtttcctggaaacagagcctgaccctaggattcttgtgcaagtgctgtagtgagggtattctcgagggaagcctccgagtaagtgagggaaataggataggccagagggagaaactgagcaaagatatggtttctgatgaagtttatcctcagtctgatcccatgggaactctggcatatgaagggtaccacagatttattcctggccttttataagctaaaaaagttagcctctggccatggcttcctcagtctggtctgagcgcagatgtcagcagatgggggcaatgaaggggcagtgacctggggctggatgcacccacctagtaaaggttatttacgcggggtgccaacgcatctacttcattcctaaactttatttttttcatgtagcttaattttttctttctttttctttttcttttttagggacaggttttcgccatgtagcccaggataatctcccaaactcctagcctcaagcaaccacctgggcctcccaaagtgttgggattacagtctgagccacctcacctggcctaattgttgcttgtaagggatgcagtgtctctctaatcttgcttaagaaatgaattatctgtatttcattttttttcctactgtttgacctttaattttttgttttgttttgtttttgtttttgtttttgttttgagacaaggtctcaccctgtcgcccaggctggagtgcagtggtgcagtcatagctcacagcaacattgaactcctgggtttagagtgatcctcctgcttcagcctggctagtagctgggactacaggcgtggctatgcacccggctaattatttatttattttttgttttcttttctttttttctttctttttcttttctttcttcctctttttttttttttttttttttagacaatgtctcactctgtcgcccaggctggcgtgcagtggcgcaatctcagcttactgagcctctgcctcccgggcttgggtgtttatcccacctcatccgactgaatagctgggactacaggcgcatgccaccacacccggctatatatatgttttttttttttttttttttgagatgggatttcaccacattggccaggcttatctcgaactcctgggctaaagtgatccacttgccctggcctcccaaagtgctgggattacaggcatgagccactgtgcccagccttaattttttaagttatcatatgcagataaaagaggcagaaccagttttagtatccaaatcagtctgatcctaaaacccgtgctctaaaccatattaaaccaccttttaaaattacatcttaatgaaataatttaatgttacctctccagctttaagggtgccattaaccacttagattttgatgtgtcggatggaaaacactccccaaacgggctattctctgttttttaaaaaaactgaatttgcctatagactcaacggattcattctgcaagcattcactacgtggcgaaatcggtgctgggcatgggtgcaaagacgacctagccctagttggtgtcttcaagaggctgcgtccagcaggggaagcagatatgaaaacacagaactattacaagggatgagcgccgcgccaagccgaacctgggagctacggacagtgtctaaactttagtcactcacaggagtacaaagatccggggctgctcctaactcctactccaaagctttcctggcctgctgggcgcacagggaagagggaagtgctggaaacttttgggaatgtgtgttttcatgtgaaagaggggaatgaaatgtatccttcagatttcactttctacttttccggccacgggctcggcacgacctgccgttgggagacgaacggtttcccgaggtggggggaagcgcggatttgccgcgggactccggcttggcgcggagctgggcgcggcaggcgcagggaggaactggcgaggtggcccgggctcggccctccgagggtgtggagcgcccgggaaacgggaccccaagaatccaactgctcccaccctgcgcggccaggagcggggctggcgatactggggacactgtccaatccgggcagggggcgaggccgggggaccgggcgggcctggggagcaggcacgtgtggagggcggacccgccgggggtcgaggcctgcctctccgagagctcctggcgcggccgtcccggcccggggccccaggtgcgcttcccctagagagggattttccggtctcgtgggcagaggaacaaccaggaacttgggctcagtctccaccccacagtggggcggatccgtcccggataagacccgctgtctggccctgagtagggtgtgacctccgcagccgcagaggaggagcgcagcccggcctcggtacgaggggtaaaggggctccgggccgggggtcctgggctcagggaacggggagcgtggcccgggagcgtctcgcggggatgcccggctccgcgctgcaccccagagtgggtgctcgccgccggcttgcgggcaagcccgggcggccacagggtggagggggccagcgggccctggactcgctccgggtgggcgagagggaggcgagcgcggtgcttaaccgctggcaccatccaggacatccagggccgcttacacggctcaggacgcgggtcagagaccacggcagttatttattcagtccatgtgctaggctttgcatcaaaaagaaaggaccgagataatcttgcctgtagctaactcctcctaacacctcttacagtttactttttaattctttactccatttaagaaacttactcctttctcctagatccttaccactttcttaccttctcgtgtgtctaatgccctcggcacagtgcccggcacatcggagtctgattattatagggtccatgacttgagttggctggtggcgcagtctcagcattttgtcatgactttgaccagctggagactttggtgccaaggaggaaggcttctcaaccatttaccggcagaagtgacccccggggcaatgcaagtcttctgagctgacagagcagagtgggtcctgcataactcgtgctttacatggaactgggcatctgctctctcctgctgacagtgggaaggatagataaggtgtccctctccaagttatccattctcctgcccaccagtccatgacaccccaccacccccttccactccctactgtttgccctttaattttttgttttgttttgttttgagacgaggtctcactcctgtagcccaggctggagtgcagtggctggatacagttcactctgcctcccaggctcaggtgtttcacccacctcaacctcctgagtagctgagactacaggtgcatgccaccacgtgcctatagtctcagctattcaggaggtaactggtaactctattgataaccaaaccctagatttttttttttgagatggagtcttgctctgttgcccaggctggagcgcagtgatatgatctctgctcactgcaacctccgccttctgggttcaagagattctcctgcctcagcctcccgagtagctgggactacaggcgtgtgccaacacgcctggctaatttttgtatttttagtagagatggggttttaacatgttggtcaggctggtcttgaactcctgacctcaggtgatccacctgccttagcctcccaaagtgctgggattacaggcatgagccaccgtgcccagcggccaaaccctaggtttttagttgccagggaattctcagacacaggtggaagagcaagtaggagaggaagtggacagggataagaaaacggataaccccatgacccaagagctgctgactctccagagccctatcaggccaaggccatcctcattcagctcatgtcagatttctgttgattgaagatagagacacaagtacacccctgcccccacccacacatagacaggcacagacacacaactactggatcaagggcttctgtgaatttccctcctagatgttcttgcatttggttagggataatgtttctctgcaagcaatttagagagtaacccgcacagtcaagccatgtaccactccaggccttggtgtttaaagggtgagcctcctggtcatccccaggctcatgtccagtggcatgtttctttgtttatgtccagccactcatttgttttcctgagctcatttattatctgcttttagactaagcctgcttttctccaagggagataaagatgagtggcaggcactggggattgtgggcagtgtgccagggagtacctgaagttccagaataaacaaggggtggggaagcctgggcaacatagcaagaccccgtctctacaaaaattttaaaaattacttgggcatggtgacacccacctgtagtcccagctacttgggaggctgggagggagtttcacttaagcccaggagttcaaggctgcagtgagttatgatcacaccattgcactgcagcctgggtaatagagtgaggccctgtctgaaaaacaaacaaacaaacaaacaaaaacaagaggaggagattttctttgagtgtcatttttacacaaatatttgaaattaaaaaacactttttatactaaaacaatcacagatatattttgaagtagaatccaaaaattgtataccttttaaatctaaaacaagaaacctcaaaaacattttgcttgggatttgagctgcaatttggtccaaacctagcccttgagggtttgttttcactgcaattagggctacttatggaggcagtttgatagacactgcagtgtcctccctggagcaactttgagtaacactcatcctaggctgtcttatctaatcttcacttcaacctgcaatggggttattaacgttggtttacagctgaggatcccaaggttccatatcataatccttggtcaagttcagaccatttgtgaacgaaagcttaaatccagctgccaggatacaaaagcctgttctcttatcctctctgccctaccataactccatcagtgcttggttcatagtaatttggatttgtggcttcgtagattgttaactaaatcttgaacaagtgttttcctttttcttattttcttcttgtcaagctgatatgaaatggggttgaatgaacaagaactgtttcaactggaaagggagcacactgctgttgtcccagctacttgggagcctgaggcaggaggatcccttgagcccaggagtttgagactgcagtgagctatgattgtgccactgcactccagcctaggtgacagagtgagatcctgtctctaaataaaaagaaaaaaaaataagtttgcagtgagtgtgaggggtgcatgctagccagcagccctaaatgccagaggggtttgacatgtggataagggaataaactcgctctttgaggtgtttggcagagctgggtggtgggctctggttgaatttgaggaagtagtttttaaaacccataggctgggtggccttgatgttggcgagagctctgtcactacaagtttaggcagaggttcacagcccttttctgatggagctgggaagggttagcagattaagctcagttaacttctaaatctatagttcccaaacttcagggtgcatcagaatcacccaggaagcttgtacaatatgcagattctgcttatttaagcagctccttggatgattgtgattcaggcctcactttgagaaactatgctttattttttttatttttttattttttgagacagagtctttctctgtcactcaggctggagtgcaatggtgccatctcagctcactgcaacctttgcctcccaggttcaagcgattctcctgcctcagcctcctgagtagctgggtctacaggtgcatgctaccacacccagctaatttttgtatttttagtagaggtggggtttcaccatattggccaggctggtctcgaactcctgacctcagatgatccgcttgcatcagcctcccaaagttctgggattacaggtgtgagccaccacgcccggctgagaaactatgctttagaaacacttatatgaatatgtgcatacttcataaattgaataaagcattaataaaaacatatcaccttcccaaggaaacttaggttttggtcattatgtataaactctaggtaatgtggtaaatgctaaaaccttccttctcaaggatagttcttttgtttgtttatttgtttgtttgttttcgaggcagaatcttgctctgtcacccaggctggagtgcagtcgtgcgatcttggctcactgcaacctctgcctcccaggttcaagtgattctcctgcctcagcctcccaagtagctgggattacaggcacacgccaccatgccaggctaatttttgtatttttagtggagacggggtttcaccatgtttgccagggtggtctcaaacccctgacctcatgatccacccgcctcggcctcccaaagtgctgggattacagatgtgagccactgcgcccggccaaggatagttctttattataccaatcacatctcccttgtgatttgattaacaggttttttttcccctgcaaactcaccacatagtcttatagtgctaacacctctagaacaatgtagagctccaactaaaggtttttttgtttgtttgttgtttaacttaattgaaactgaatagattactacattaattccctgaggaatttaggatttctatctaaggcttgttgttggttttatcgggagtaatttattagtgtttggttttgtttgaactggactgagagcttttgctatgggaacctgaaccaccacctttgaagaattctttttaaagattcaagttgtttgatgtcagtaaattgccataatgcttcttggtccacactgcttgacgtgaaaaaacagagtgaatattatattgcagctaagtgtcagactgtaaattactacggaaaagaccttctacagcctggtcaacatggagaattctgtctctaccaaaaacaaacaaacaaatgaaaaaaaaaaaactataaaaattagccaggtgtggtggtgcactcctgtagtccaagctatatgggaggctgaagtgggaggatcactggagcccaggaggcaaaggttgcagtgagccaaaattgcactactacactccagcctgagtgacagcaagactctgtctcaaaaaacaaaaacgaaaaatccttccattttcctcctcctccccacgaaataactaacccttgaggcctagaagaaacacacagaacaagcagcctgacatgtaacagagcaggaagcccccccatgtccacctctacctcattttgtcaagtcttcaagagacctccaggcccagtcactgtgaattcattcctctgggtttaggcactcacctccccgccaccccagagaggtagcatattaaatcattaacagaatctaatataaaggggccctgtgattactgggaacaagttctcctgatttatatgcgattgaaccatattccctggagtaggtcctttagagctataagcccttgccatgatcagcccccagcatcttctctcttactcctctacaggggacttaggaaaacattttctgagtcttacccaactttagcttctgctattgctactttttgatgctgtgcaagcacctgttgactcagtggttctcacccttcttggagtcacagacccttataagaatctgactgaagccatggatcctttcttgataaaaataaatacacacttaacatttttcgtacaatttcaaggagtttatagacacacttctaaactcagtcatggatacaggttgagcaatgtgtaatgagttgcagtcaaaactacacaaaattgttacttttttaattttcagaaagggggtcttgctctgtagtccagcctggagtgccctggtgtaatcatagctcaccgtacccacaaactcctgggtttaagcaatccttccacttcagcctctagagtagctgggactacaggcatgcccagcttattattattattatttaaaaattttgcatagatagggtcttactatgttgcctaggctggtctcaaactcctgggtgatcctcctgccttggtctcccgaagtgctgggattacaggcatgaaccactggcccgaaattatttaaaaatattgtataaaattactgtgggggacaagagaacggatcccctttgccctctgaaggtttgctgaaaaatcaactcacaaaaggagataattagagaaaaggcaagccaggcgcggtggctcatgcctgtaatcacagcactttgggaggctgaggcgggtggatcacgaggtcaggagattgagaccatcctggctaacatggtgaaaccccgtctctactaaaaaaatacaaaaaaaattagccgggaatggtggcgggtgcccgtaggcccagctactcaggaggctgaggcaggagaatggtgtgaacccgggaggcagagcttgcagtgagccgagatcacgccactgcactccagcctgggcgacagagtgagattccttccgtctcaaaaaaagaaaaaaaaaaatgagagaaaaggcacacatgcggaaaatacatatattatgggggaatattaattttgcattatttttcattaattttacattatattaatatattaattataaaattataactatcttttataaattatattacataaattatgttaacttgcattattaattttacatattaatttcacattaattttatattaatacatattttatgggggaatattcattttcccccatattatacatgaaggaaaatcacagagtgaatttacttaatattccagtggggtgcagatgcttgtataccctacttctttttttttttttttttaatacagggtctcactctgttgcacaaggctggagtgtagtggcatgatcgtggctcactgcaccctcgacctcccaagctcaggggatcctcccatctcagcctcctgggtagctgggactataggtgcatgccaccacacctggctaattttctgtatttttttgtagagacgaagttttgccatgttgcccaggctggtttccaactcctgggctcaagtgatccacctgcctcagcctccccaagtactgggattacatgcgtgcaccactgtgcctggcctacaccctactttttagaggaaagagagttgaggaagtgtggatgttttagggaggtggcaactgatgtttgggggaattcagctggctcgaagaacatacaatggcccgggacagagcctcttgggcccacagaacagacaatggtttgtgacaaaagtccatccaggtgtgttgacagacttttgtctttcctactacaatatgaattcagctaatgaaaactcagggaagggactaggggtaatggtttccttttttggtaggtccagactttagtcagataagggaacttcagagaacaactttgggagagacagaggattgagagacaggaggtaggaggggggatgtctttggttcagcatgtcaaagcaccatattttgggatatcagtttctgagccccagcagacatacacattgcagccttgtttgtagtagcaaaatagtagaaacaacctaaacatcagtaaagatctggttaaattatggaacatctatgcagagtaatactatgtagctattaaaaaatggtgcaggttgataggaactgatatagaatgacagtgaagatattttttaaaaagtaaagtacagctgtgtgtggtatgctaccattttggtgtataaaaatgatggaggctctcacacctgtaatcccagcactttgggaggctgaggcaggcggatcacttgaggtcagaagtttgagaccagcctagccaacatggtaaaaccccgtctcttactaaaaaaaaaaaaatagctaggtgtggtagtgcacgcacataatcccagcttctagggaggctgaggcagaagaattgcttgaacacaggacggaggttgcagtgagccgagatcatgcccctacactccagcctgggtgacagagcgagactctatctcaaaaaaaaaaaagaaaaagatggaggctgtctatattctcatatgcttattagtgcattaaatacttctaggaggatacacaggaaaattataagagtggttgcctggggagggggaaggaaagtcttacagacttgttgttatgtacttatttgtactatttgaatttgttatgtttatgtattaccaattaattaaaaaaaaatagtgttacagatatcacctgcccattgaacattgtttgtgaagaaggagaattaaatagaaatgaagaatgtataattatcagatttccaaccttaaaattaacattcgatcatatacttccttatatgtgtacaaaggactagcatgcaagtatccttcagtttccaatgagatgaagcagccaccgctcattcttgccgtgtgtttcacttgggtagctggttccaaaagaatgtaaagtgcctctagttggatggtggagaaagttctgcttttggttttgttttgtttttgtttttctaagacagggtctcactctgtcaccctggctggagtgcagtggcacaacaatggcacactgcagcctcaaactcctgggcgcaggtgacccttccaccttagcctcccaggtggctggaactataggcacgcgctgccacacccagctaattttttgtattttttgtagagacagagttttaccacgtttcccaggctggtttcaaactcctggagtcaagccatctgcctgcttcagcctcccaaagtgctgggatgacaagcatgagccatggtgcctgacctagctctgtttttaaatggtctgattggttccagtgtgtctttagctgcagaagcagagagaggaggtagatgggataaatcagggcctgtagactaggtagacctgctagggcaggggcctttgtcagagaaatgtctcccagtgatatcaatggccatgggcactgaggggcctgaccttggctttggagcctggacccctatcttcagccagactatgtcttagtctgtgagggacctgcctctctctgctggagatgttgatagctaatgttcaccaagtgtcttctatgatcctgaccctgtgccagacatctggtatgatattttattaaattttcacccatattaggtgggtactagtattatcattgccaatgtaaatgaggaaactgaggcacaaaggggttgagtaatttgctcaaagttgcacactgacgagcttcacagccaggatttgaacttgtcagtatgactctatatcctatgctttaccactctgtgtaataggttaaaagtgggggaatcaggccagccgcagtggctcatgcttgtaatcccaggctaagcaggtggattgcctgagctcaggggttcgagaccagcctgggcgaaaccctttctctaccaaagatataaaacaattggccaggcatggtggcacactcctgtagtcccagctactggagaggctgaggtgggagaatcgcttgggccttggaggcagaggttgcagtgagccaagatcgtgccactgaactccaacctggatgacagagtgagaccctgtctcaaaaaaaaaaaaaaaaaaaaatacaaagtggggaaatgagcagaaaaagacagggctgggagattaagctatggggatgaattctttcagaggggaaggaggagagcctaagtccaaaccacttgtccaagatgaacttgatattgatttaggtcattctgagtatctaggggatccaggtgaggagtggagagcagaggctgaatcaggaccatgtgctgcatcatgactctggtggcccatccttctgggatcaagacttagggcagcatctaaaggcaggggaggcagctcagaaccttggcgtagggtcttcaagaggtaggcaggaggtcagtggcctctgccaaatgggcaaaggtgcatttatttattatatatgtaagtggcgggcactagagattcaagaatgaaacacactgactcagggagataagtaaatcaataattaaaaaatcataggactgtatgatcagtataataatttgatatatatgtgcagactgccatggagtaacagaagaggtgcacctaactctatcattagtggtcacagaaggcttcctggaggaggaaggtttatattgagccagggctggagaagaagggcttatgcacagttgtggagatgagaaagctaagccaaagcacactgaaggaatggcatgtctgttacagcaggcaagtcccagaggtggagatggaggttccttagaaactaagtccattctgtaggtgtatgggagacagggcagatgagtattgagggacaggtcctagagggtccaaggatcccatgtaaggaactgctggcctggaatataaatccctacttccctttgcatctgttccagtgcctggcaaagttatgtaataaatgttttcagataaaatgaaagtgctgggtaccaggaaggaaatcaaggcagagatttagccttggagaaacatgactccttgcttccctgcttaccctgtccagacctccaatattcatcttcgacatggtctccttccctgattgacataatctgggtcaggggcctctcctacacactcctgacactttctgtgatttccccagcatgggaatgggaatgttcacaccttattatatctgatcacatacctgcctcctctcttcagctttgagctccactgagggcagggacgatgcagccccctctggctagcacagtgctgctgagcacatactcggcccttgctagaagtgtgcagtatgaatggacaatttcccatggcctagaaaatttagtccaccctctaggcctggcctgccacaaaaatgatccagttttgaaaattacttctgtagctcttgctccgttcatggtgtccttaaactcccactcaactccaagctaactagtcttttccaaataagtcttaacgttcataatcatagcaggagctttgcttttactgtttactctgcttggaaaattctttccctattgaaatcccattattattcaaagcctaagtcacgtgagagctcttttaatttcttaggtggacgttgtccatcttcccctaccctgcaattcgtaatagttctcacatgccgctttgtctttaaactagttatgtacctgttctatttctcttagattacgtgcttcttgagagcaagatcatgtctcctccatctttctcttgccatgcctagtatatgataggggcaaaataaattttaagtaaggactatgagtgcctgcacacatagcgagtggcagttttggaactggggtctgaaaaccacttgcataagaatcagggcctgggctgattcttatgaggagaatgccagggttgcttatttaaacttgattaaatgaagtctctggggcccacccaagatttccagagtcaagggtcctcaccgaaaatctatattttaactgctccccacgtgacttttgtgtacttttgaatttgagaactttcctcaggtaacaagctagacagatgctgtacaatcgatattaagtagaatccttttgaagctgtagctccagacatcatgtcctgacaacatccagggccaggagaaagggggaatttggctggctgactctgtctttttagcctggaggaacttcaaagcgtcttagcaggtttgtccttatttctttttggtcagaagtgggtcacatggccactcctaacccattcatggctgttcaaagggggttgccttggaccacttattatttcctcctggggctagccccaccttcctggtttaccaaacccaatctccaaacagaaagaagtttctcctaaggaagaaggaaggtgtagtggaggttgacattattgctgattcttgcaaaaaagtctgtgcattgcaataactgctactatcccaattttatgccaaaataaaccagctctcataggtggggttaaatctggagggcagaacagggactggaacttggttcttgttctggattctaagcctgaatgatcttcatgacagcctatgccagcatccatctgtgggaagagaatttaatttgaagtttcacagatatcatggaatatcagatctggcctaccaggagtaatgcatgtttgcagtggatggttttgagaactctgctgtttaaataatctttggcaaacacagtatttcctaagtcatgtttatgcaagtgttttaaaagtgttataacttcccccattaacataacttatccccgttcccatttcctcatacttgatgtaaggtcatgattggcgatctatacttacgaaatgcccatggtgtggtttggggaccctttcagacatcaatagtttgagtctagaattattactatagaaccagggttctcaaacctcagcatgtatcagaatcacctggcgggattcttgcactttacaaagattatttatttttattttttagagatgggggtcttggtatgttacccagactggcctcaaactcctgcactcagggattctcccacctcagcctcccagtagctgagattacaggcacaagctaccatgcatggcctggaggcttcttaaaacccaaactgctggatcccatccccagagtttaggattctgtagatctagggttgggcctaagaattgtactttgaacaaggtcccaggtgatggtgatgctgttggtctggaaaccacacttttagaacaaatgatactgatctgggtttattgaaaagatgatataataggattttatcatgtgtaccacacacatcctatcctttccaggttcttttatgctccctcctaaggctgtcctggggccttcccctctggctgtgttttgcacagagggattcacctagccttctgtattttggtgactctaggctgggcttgttctttggaagtgagaaggtagagtgaggtctatgtatcttccctccaggcctggttcattgtctgtatacgaaggtggctctaaatgttggtcttgaaattttggtttcactttaaaaggaatgaaattctattagatggtacagcatggacaaaccttgaaaacatgctaagtgaaataatccagacacagaaggataaatgttacgtgattccacttatataaaatacctagaatagtcaaactcatagagacagatagtggaatagaggttaccaagggctaaggtgagggggaaatggggagttactgtttcacgtgttcggagtttctgtttggaatgatagaagagatctaggaatagatggtggtgattgttgcaagacattgtaaatgttcttaatgccactgaattgtacactttaaaatggttaaaataggccaggaacagtggctcacgcctgtaatcccagcactttgggaggccgaggctggcagatcacttgaggtcaggagttgaagactagcctggacaacatggtgaaaccctgtccctacaaaaattagccacgcatggtggcctgcacctgtagtcccagctacttgggaggctgaaatagtaggatagcttgagccagggaggtcaaggctgcagtgagctgagatcacaccactgcactccagcctgggcaacatggtgagaccctacctcaaaaaaatttttttaatggttaaaatggtaaattttgctatatatatgttaccatgattgaaaaaataaatcttgcttttgttattcttctatctcccagtgatgtgctgaattgtccttgtatcagcccctgagagctagttgttaaatttttagaggttttgcaagctgattgttaaaaatagccagccgtgatttaaaattaaattatatgaactaatgagtaaataagttatattgaaatatgaatatttataagtaatttgtatttaaaacaattcatcatttcctaattctttttcctaccttttaccattatctatgctctcgagggtatttatgtctattatatctgtgtggtgaaactagtattaatgtgtaatggggtgctactgaccatctactcccaactccaagttgagtgacatcacattagtaacttgaaattggtcagggtgcaaagatttacaccaaaaaagtggctacacatcagggtgtcctttccttggagagctggctattagctttatcagcatatccctggccttaccttgtgggttagggttggtgtaagtttgtaggaataaaacaccagtcacttggaagctaccagcccagctttctttaattgaatcctaaccctttccaaatagccctgccttggggcgtttttgctgtgcctaaaaaaaaagggtggtggctgagtttagtagcaggggaagatgagtcacatagtcagctagttactttttaacctcatgggtgcctttcctcaactgtaaaatgaaaggggtgggagaaaaactagtagaaataaagtaagatcatttttctagcaatgagaaagagatactttttaaaaaaagtttttattactgatcacagccagttacagagatttctttgttccttctctacttgtactgtttcccttgactagctttaaaaaaagcttttattatgaacattttccaatatacacccaagtgagagaatagcaaaatgaaccagacttttctaactattgaaatattataatgaggaatacaaaggaaaagatggacaggtataatttaaattttttcttccaaattttgactatacaaaactaaaagaagaatattaaattggaaacatacttagaattaatttttggtataaaatattaaaatttataatatatgcataatgtatatgtcagtaaagcaccaagatcctaaaaatgggcaaaaaatacacaccaataattcacaaagaatacaagttttaaaaaaagaaagattcagtgttcctactacttattaaattaattaattaattattattttttttttttagacagagtctcactctgttccccaggctggcgtgcagtggaccatctcggctcactacaacctccacctcctaatttcaagcaattcttctgcctcagctttccgactagctgagactacaggcacgtgccaccatgcccggctaatttttttgtattttcagtagagacggggtttcaccatgttagccaggctaatcttgaactcctaacctcaggtgatctgcccgcctcagcctcccaaaatgctgggattacaggtgtgagccaccgtgcccagccatttttgttttatatatatatatatatatatatatatatttttttttttttttttttttttaggtggagtctcgctgtgttgcccaggctggagtgcagtcgcatgatctcggctcactgcaagctctgcctcccgggttgatgccattctcctgccccagcctccctagtagctgggactacaggcacctatcaccacgcctaattttttgttttttttttttttagtagagacagggtttcaccatgttagccaagatggtctcgatctcctgacctcgtcatccgcctgcctcggcctcccaaagttctggggttacaggtgtgagccaccatgcccagccttttctgttatattttaaaagataaatcccaagaagtagaattcttgttgcgtggtgcatacaatttactaatggccaaattgccctccaaaagtactgtccagggccgggtggggtggctcacgcctgtaatcccagcactttgggaggccaaggtgggtggatcacgaggtcgagagattgagaccatcctgggcaacatggtgaaatcggtctctattaataaaaatacaaaaattagctgggcatagtggtgtgtgcctatagtcccagctacttgggaggctgaggcaggagaatcgcttgaacccaggggatggaggttgcagtgagccaagatcgtgccactgcactccagcctgggcggctgaatgagactttgtctcaaaaaaaaaaaaaaaaaaaaagtactgtccaatttatactccccacctgcagtacaggagagtatacccaatattgtgtcttactctttttcatctctatcccagtgtagtaaacatgaaaacaaatatttgcaacctctgcctcctgggttcaagcaattcttgtgcctcagcatccggcatagctgggattacaggcgtgcaccaccatgcccaggtaatttttgtgttttttgtagagacagggtttcaccatgttcgccaggctggtcttgaactcctggcctcaagtgatctgcccatcttggcttcccaaagcgctgcgactacaggcgtgagctaccgtacctgacccctactactaaggttaaaaggagaccaagcacagaggcttacgcctataagcccagcactttgggaggctgaggcaggaagattggttgaggccagaagcttgagaccagcctgctgggcaacatagggagactctacctctgcaaaaaaattttgaaaattagccggaagtggtggcacatgcctgtagtcccagctactcaacaggctgagatgggaggattgtttgagcccagaagttccaggctgcagtgagctatgactgtgctactgcactccagcttgggtgacagagtgagaccctgtttcttaaaaaaataaaaatgataaggcaagttaataataataaggttcaattttacgcctaaatattaaattaagaataaataaattgagcaagcaagctaacttatgggtggttgggctttggatatccttataaattttgaggacaactagaaatgttcataattatcagatatcacaaggaataagccaacagaagtaagtatctacaaggctaattgtaaagattataggccaggcacagtggctcatgcctgtaatcccagcactttgggaggctgagcctcgcagatcacctgaagtcagtagttcaagacccgtcttggcaacatggtgaaaccccatttctactaaaagtgttctaaaaattagttgggtatggtgacgcatgcctgtaatcccagctactcaggaggctggggcaagagaatcccttgaacacgggaggcggaggtttcagtgagccaagatagcaccactgcactccagcgacagagagagactctgtctcaaaaaaaaaaaaaaaaaaagattataattctgagatagaaaatctgaacaaccaatagtagggacattgagtaaattatatcagtttgatggatgactatagtaaaatagtaaaataataaatatggtgattgtataaaatatagaaaattaagtagaagagtagaacacaaaattatatacatactgtgattacaactgtgctgaaacactggaataaacagaaagtagatggtaagtttacattactttaaaaaatgtcctttacagtgtttaaagttgatttaataatctacaaaataaaatgaaagggtgaaatagatgattgctaaaggctttccagtctctaaaattctatgaaagttaatcatttgtatttgtaagcgtggaaagattcattattttcaacactgcagtgaaaaattctacctctacctagattctgcagggtttggaaaacaagtttatcagatcacacagtttactttaataataacaataataataacagctagagggaaggagaggttaatagtgataaataaaaccagcactgactgtccaggatgcatacttcattgttactgccataagatcctgaggctgctaaaacaaaaccaaaaaataattttttggcgtgtacatatattatctttaaaatttaaaattaaataaagattaatattaaaaagacaattagtattttgttttatcttttttttgagacggagtctggctctatcgcccaggctggagtgcagtggtgtgatcttggctcactgcaagctccacctcctgggttcacgccattctcctgcctcagcctcccgagtagctgggactacaggtgcccgccaccatgcccggctaatttttcgtattgttagtagagacggggtttcaccgtgttagccaggatggtctctatctcctgacctcgtgatccacccgcctcggcctcccaaagtgctgggattacatgcatgagccaccacgcccggcctgttttatctttttttgtgattttttgaggtattagtattacattttctatgacctctgcagttagtcttcatttcttttaggaaggattccatttttatgaaaaaacaatttcattgaaaccaaacagtagtgaaaagagtgatatttaaatatgagttggtaagtcgtttttgaatacacatatggtttaaaaatctaaaatctcttgacacttgattaaatagagagagggaggagaaggatggtcatagaaaatgaatcttgcccttgatgtgatgagtatggaatatttaagccaaaatctgtagtctcaaaggatttattgatgttttattgccagccagtcttcttccctgtttagaatgctatgtttttctgccaaacactgaggatacctaatagtttcctaagtgtttcttctgaataattaagtggattattttcagagatagactcttcttttaagtattctggggctttgtttttttcccttgttttctagcattttgacataggtgcatattatgtttttctttttcttttttagcaaatggggaaatgaaggcactgagaagataaataaacaagtttttgtgtgcgtgatttaaagagatagtctgaccattcatgtaaagtgttcagaacagtatctggccataataaatgttcaatcaacattagctataacaattattatcaaataagataaaatatgtgtagagtttgctatgcagtagaaatacaaagtgaggctgagtgtggtggctcacactggtgaaccactttgggaggccaaggtgggaggatagcttgagctcaggagttcaaggtcagcctgggcaacatagtgacacctcgtctctattaaattaattaattaattaattaattaaaaaataaataaatataaagtaagccacaaatgcaagtttgaattgtctagtaattacattcaaaaaagtaaagaaacaggcaaaattaacttaataatatagatatattttacccaatatacccaaagtaatatcatttcaacatgtaatcaatataaacattattaatgagatattttataggcttcttttcgtgctgtgttgtagcagtctgatgtgtattttaaactgatagcacatccaaatctgaatgcaaatttttcatcaaatgtctgtatttagatttcatgaaatgttcagttttcacatcaatttacatgctcaaattatttcaaacatacttcaaaaatttttccaataactaaatcaagtacctaaaataattttcctttaatatttgcatccacatggaaaaaactgattcatgttttttaaaagaatttcacttcgaagtgaaaaggctctcgcttttaaaactgcatctttccaagttaattcacgaactctcttgtcaattccatctcttgttctttactgtgccagccgtgatgcttctgctactccactcaattgtacatcagtaacgtgcctttgttttaaatcttaaaacgtagctgggtgcagtggctcacgcctgtaatcccagcactttgggagtctgaggtggtaggatcgcttgagcccaggagttcaagaccagcctggacaacatggtgagaccccgtctgtgacagagcaagatgctgtcttaaaaaaaaaaaaaaaaaaacttaaaatgtgtccatagctactttttaactagaaaataatttaattatgttaaaataactcaaacttgtgctgtctgtaaaacttcttcaaataaatacattaaaatattgcatcagtgcctagaaaaatatcaaagtgaataaatctgttggcaccaactagattagtgattacgtgtaatactagaaaagatgccacatgcttgacatgtgccctacacatacaatggttgaacaatgtagccctaccagagcaataaagctgtgtgtaatggggaaatatttcatactgcatcaatttcaaaatttaaatataattaaaatgaaacaaaatttaaaatttagtttctcagtctctctagccactttcagttgctcagaaacatgcagctggtggcaccatattggggtatagagacagtctgtcaaaagacagggtgaggagccaggcgaggtggctcatgcctgtagcaacagctacttgggaggctgaggtggagaatcactggaccctaaaagctggaggctgcactgagctatgatagtgccactgcactctagcctgggtgacagagtgagaccccgtctaggggaaaaaaaaaaaaaaagacatagtgaacagaacactttagtgccaccacgtgcacctttctgtgttagcatcagctttacagcagaggagggattgtaatgggcctggtctaattcccagttgctagctggttttccctttgttcttctctgcttctttttctgtcacaaatgcctggttctctgggcaaaaataaataaataagtatgtatttatgtatattaaaaatataactcctagcatggatttctgctagggtgcttctcactgatcatgcctccttgaatctactctgccaccatgattcgcgccccaacacctctcggcctgctttggatgaggagggccagctatgggcctacctcacagctcctcacctcagggtagggtgttctgaatagatccccacatcagacagagctgctagagaggcagaccccatctccctattgtctcataaacacacacactcactcacacactcacacacactcatactcactcacactcacatactcttcatccagctccatctgccgtaagtccgtttcacttcctctcagcttctaacattatctcatgaccatcctagtcttttccattgtgtcatgagtttctcccttttcttccctgtgccttcacgagaatcttgaatgagaaactgggagcggctgctgcatcagaaatagtaagttcctcacgtgaatcagaaatccactgtggaagaattttacagttctgtttttgtgctcttctgccggaatcagcttgaattttggaaagatgtggggacagaaccctgccctggcccagagagggaatggctgatccaaggggaggaggagttgcccacagagctggaacttgatgacttcggggcgcgggaggccccagaacaaagtgagactttgaagagagcagtgcttactctctgctcagttccagatctccgaggtggagccagttgaaatctgtgtaggaaacaaagctgcttttctggttcatctggaaagagagggctttttgttttttccccacgtgggcaaatagaggtggtgatgttgtgtttttagagccagaaggaaagttctgggctgcataatgcctatattccaggcaaatagaacccaacaaggaaaatggtctagctttatcactgactcactgcaaatcccttccctcctgtactttaatttattcattttctttttttaaatgacaaactgatattatttttaatttttaaatacttcagtgaccacaggacataatacttttttttttttttttttgagatagagtctcgctctgttgcccaggctggagtgcagtggcgtgatctcgtctcactgcaacctccgcctcctgggttcaagcaattctcctgtctcagcctcctgagtagctgggattacaggcgtgcgccaccacgcctggctaatttttatatttttagtggagatggggtttcgccatgttggtcaggctggtctcaaactcctgaccttgtgatctgccctcctcggcctcccaaagtgctgggattacagacgtgagccaccgcacctgaccttagtttttttctgacgtggtcctcttcttttatctctaagacttatgattgctaagacaacaaaagataccatcgttactggccaaccttggaatttggtcttgggaaatggaggcctgtagtttgtaacccataagaagagactgaaggggcctaagtgcagatgagaatccctggtgatagaacagacaagaactggagatcaatgccaatagtttgtgatgaacgtcttggggttcctgtgtgatcaacctgttgggatttctgtattagtttcacactcacctgtaatagtttaccaatggtgtttctgaaagatgaacatgaaattaagcgatctttcatgtttcctcgagggactttgattctaaaataactctgagaacagatcaggaaacatgatataaccctaaccatgcttgacacattttctctttaaataacagttatacttgaggagaggattttactcatgatgctgtgcaaaagccacatggattccactggtttggactttgccttagagtgggcgttgctaagtgatggataacagcagcgtgcttccctgagaggccactgtgagcctcttacttaggttgagaacttgacctcttacttaggttttataccaccataaaatgcacccatcttaagtggttagtttgatgagccatcgtttcttttaaggagttaacatttaaaatcaacttttaaaaattgtggtgaaataaatacacatgaaattttaccatcttaaacattcttaaatgtaacagttcagtgacattaagtatattcacattgttttgcaaccatcaccaccatccattcacagaactcttttcatcttgtaaaactgaaactctgtactatttagctgtaactccctcttccctttcctccagcattatcattctgctttctgtctctatgaatttgactactttgagtacatataagtggattcatgtagtattcatccttttgtgactggcttatttcacttagcttagtgtccttaggttcatcagtgttatagcatgtggcagaatttccttcctctgtaaggttgaataatattccactgtatatattccactgtatatatgtgtatacacacacacacacacacacacaccacattgtgtttatccatttatctgttgagggacacttgttttgcttccacttttggctattgtgagtaatgctgctgtgaacatggatgtgcaaacatttcttcgagttcctgcttcctgttcttttgggtatatgtatacctagaagtggaattgttggaccatatggtaattctatttttaatttgttgaggaaccaccatactgtttttacggtggctgtaccattttactttcttaccagcagtgtagaagggttcaagtttctccatatcttcaccaacatttgttgttttctgttgttctgttttgaatagtagccattctaatgggtatgagtggagttcagtgagtgttggcagatgtatatatccgggtacactaccccaatcaaggtaaagaacattttcatcaccccttgatgttgcctcatgctcctctacagttagtatcccttctgcctcaccagtgcccccaatcactggccccagacaaccacttttgcactttctagcactatatattagctttgttcgttctagcgtttcatgtaaatactttgtttggcttcatttagccagaataatgcttttgaggcttatctaaaaccctagtctaaaatcaattgtggatggaaaataaaccgcagtgtgactggagttcgatactatgctaatggttggttagagaataccatgggtctcagaaagaaagtgagaggaggagaggggggctgaggaagcaggagagggcccttcctagcaatgaggccttcaggaagcccaaagagccatagcaattaatgccagtcctatggcttcgggggcagccagttcaattaatcagcaggcatttcttgcaggcccgctatgtgcaaggcactgctaaaatttagaaacaggaaagtagaggcccaggatgagaatttggagagggaagatgctgccttagaattcatacaactggataatgcttttgtcagaggacagacacacacagaggaccttacggacttggtgaccaaaagaaccacaaaggaatctagtttgacttgttggtaaatgtgaaagcctgaactctatacgccacagatgtttttcatgtgggtagatttggtaaccccaccttaaacagctcactaaacaggtaatgctagaatactgtagatgtgataaagattacttggagagaacagtaatagaagaatagctaacatctgttgagtacacaatgtctgcaccattctaagtacttacgtgatgtaataacttgattaatttttgcagttgtcttataaaggaactattgttattaactctttgttacccatgaggaaactgaggcacaagagattataccttggcccaaatcacccagttagaaagtacctttaggaggattataaacccaggtggttgtgctccagggctccaaccactttgttatagaggaaggatggggtggtcattgaaggagaagtttccgtttatctgaatggcccatgatgtgaaattagcaactaggccaggaagttggctgcaccatagttagacctgtacttttcctttttttctcatcagaagggtggcatagatcacccatcctagggtgagcttgtgttgcccacagtgccagcaccttccagaccttgggtcagctgacagaacctaacatgttattaccaagcacactgcccagaaggcaaacccatcactcgcctgtagataggcctgtttcctagctataaagtggaggggtgggtctgatgcgctctaaagtcttttctaccctaacaatccaatctgggagaaatgcactctttctggggggcaagaatttcccctctatttctactcccattttctttgcatgcttatattgtagccttagaattactctctcatgtatggtttacttcacattttgatctgaaacagggaaaatcaaccttgagtgatcaaaagaagggttgtgcctttaagcctggaggggcgctgcctccaaaagcataagcaactgccatccagggctggaaaaaacatgttgcagctgtgccaactccatctgaggctttgaatgaaagcccataatgttttcagtttgtagcaaaagctagaagagctatttttggcattcctttctctactggtatatactggatagtcttaatattgctggtgctaaaataaacataaccagatggggtcattatatctaacctgtttcgacactggattcagataccccgaagtcatgatgcatcagtagtctctgaagcaggctgtactttgggaactttgctattgtggttggatcagccatgacctcccaacctaaacacaggatgctgggccctgttttaagggagggccacagaatgtgcttgggtggaatctttatgtcccttttagctggagatggcaaaactctgaccatgtgtctgcccaaagagacatattacagagccatgccacgttgttctcccaccagaaaggccgtatggctgaattagagcgtgtggggattagaaatgcgctgctttcttgaaatggccaccagccttgtactaaacatgtttgaccggggccatctgtctgcccgtcaaaagtgtggtccagtttccatcagataagtctggaagaggacggtttttgttgttgttttgttttttgcatccagcttgttaaaagatatgaagaacgagaaagttttagctcagcaagaaatgtaacaatttaaagtttttattctgtcatgattctaaaagcctctagaattgtcatctgccttttcacctaattatacgcatatgtacatactctttatatatatacactttgtatatattatgcatattatgtaaatatatacatatgtacacatatataatattcatataattatacacgtatacacatactatatagtatatgcgagtatatattatagcatgtattcagcatggtataatataaaggtctctaaagacaggcagacctatgaaaacatagctcttatcacctattactgagtgacctggggtactatgcttaacttctctaaaacttaaattatcatgtccagtccactggaaaataatagggcaaaatgatataatagtgacaaaacacataagcattcagtacaactagctcaataactacttattttaaaataaagtccctctggctctagaggatggaataaggaatacaaggccagctctcctgatggttacagctgcttagcagtggcaaagcctacctgtggaggagtgagcgcagggccagagagaggatgactggaagctgggagaggaccattgagaaaggtcgtaaagtctttacagcaggaagttcaaccacgtcatctctgtagcttccaggatttttttaaatggcaggttactcttaaacctacaaggcataggggatcatatactgtcatgaaaggtatacaggcggaaaggaaagtgtgccgtttagtaaatcaaatggtacctgacatggggcaggcattcagataatgtgtgttgaatgagtaggtgaatgaacatgaaacatcagtaaaactgtcctgtaagtcccatgatagaaataatcagcattactaccacatcagcttcttgtttctcaggtcactggactgaggggagggaaatccaaataatttgtctgcaattaaaaggcagaaggtcaggtgcagtggctcatgcctgtaatcccagcactttgggaggtggaggcaggctgaccacttgagcccaagagttcaggcccagcctgagcaacatagtgagaccccatctcaaaagaaaagttaaaaaacaaaaaacaaaaaaaaacctccaccaacaaaaaaccagccaactgaaattccaaaggtctctagtccacaggtggcactaggggtcactcagaaaataaaaattaaaaagaaaattacttaggaaagtctaaagcactatattgggtacttcattatatctgaagcaagttgatgatggtgcccagaaaaacaaggtagggaagctgcacatttataaagcgtattagaatattctttgatttatgcactattcgaagcttgagcctgggaactaaggccatacaacaaagcaaggattaaactatcaacatgtgggacccagtcagctttcccagcaatcattgaggccactgtgactttccttattgttataaaatgtagatatttagccctacctcttaagacaagatagaactcaccacaaccagttttcactactgtagtatctagtggctttcaaatcaggtaaactaggtgttttatcccagtctggcctcatgctaacttcaggcaaattacacaacttttctcagtttttaacttgttaagtggaaataatagtcattgtcccagaggttattgagtagataagataacatggaggagtgtttaataagtgttccctccctccttcccctgccttttagacaaagcaatcattggagtaaaaactggctttggcatgatgtgggaagagcagagaaggcgtgggatgttttaaattatatgtaaaatacatttttttatttttttgagacggagtctccctctgtcacccaggctggagtgcagtggcgtgatctcggctcactgcagcctctgcctccaggttccagcgattctcctgcctcagactcccgggtagctgggattacaggcacgtgccaccacacccagctaatttttgtatttttagtagagatggggtttcctcatgttggccaggctggtctcaaactcctgacctcaggtgatctgcccacctcagcctcccaaagtgctgggtttacaggtgtgagccactgcaccaggcctaagatacatgttttttaattacttgtggattgaaaggattattattgccctcaacagtgctgtgaataactggccaaaatatggacaaaagaccgtccgtaagttactagctgggtgctaggctggaatcgattcttatttaagatggcctagtaggcaggcctccaaatttgttttcattcctttaccttctacatcttgcctttgaatacacgtttaaaatgttatttctcccaactcaaaccccgtcactgcaataaaacttcctttacttttagaaggatctaagttccaagaaaaaaagaaggaaaaaaagagagttactctcattttcctatttcatagacagttttgaaagcctttagtgtttgggtggggcccagtcacaccctttgcaatctgcagaccagtggtttaaatttgtcatccttgtgggctgtaaaatgaaaccatgtaccaaagaaaaatagtgaatgactcactcacatgtgatcttccagcgaagggaaggattcagtaggaatgtgccacaaggctggcaggtcccttcataataggctcaggtggcctgttctgggatgtgggtcaatgttaggaacctgaatggaggccgccaagttgtggtggggtctgaaggagagcttcagttaccggggtgaattcaccacaatgcaacatccagcagacccagagaaactctctctcagcacgacaagaaagggaggattcctattcaccaggctcattaaacctgtacgcacacacacatgcaaacacacacgtgcagacacacacacgtgcagacacacacatattgctaatttatttatattaagaaatacagtgccaggcatggtggttcacacctgtaatcccagcacgttgggagggtgaggcagacgatcgcttgagcctaggcattcaaggccagcctaggcaatgcagcgaggccttgtctagaaaatttaaaaaaaaaaaaaattagctgggcgtggtggcacgtacctgtagttccagctactcgggaggctgaggcggcaggatctcttgagctaagtagttcgaggctgaagtgagctatgactgtaccactgcactccagcctgggcaacagggcaagaccctgtctccaaaaaaaaaaaaaagaaaaaaaaaaaaaaaagaaaggaaaaatattatttaggcaaaaatcctcatgctccaatatttgtagacaggttgatttgggaagccaaactctagcctaaaaggtgcttggcaaccatggaacaagggagtattagatggacagaattcatcttcacagtggggaaatatctgacccccgaccactggcttcaccctttccgtaggacagggcttagatgaatatttcaaagtaagcatctgtgccagttttgcatggagcttgctctgctgatggacacaagttttccttaaacatgctaatatcttccagcaagcctgcttcaacccaggagccgttctttcccattaaaatgagtttgcatatctttgttttgatgggtgtttgctgattttactagtctaatgcttagggaagtatctactttgcccgctttccaaatgctgggtgagagaggagaatgcaccacactgttacctccacatatagcctactaaataggacttgaaatcagaagttcttgttccacatccctgcagtctgccataaggacataagaaactttctagttgagtcagcacctggcttgcccatttctggcagatacaactgggcaatttgtgttacagtgtattattatccttctggacatcctggaaaccagtatagatgtattctcaacatacctactttttctttatgaattcattgtaaattatttccatgaatttatgtaatcttagttgaaataagttgaacttatttacaacttatttttcccttttgtaactgctattgagataggtctcatatgtttaattcccaactatctttcagttgctccaaaactatgtcttaaaaacttcagatccctatcctaagccctagtcgtagagttcagatactgttaagaagctgtagtcacccacccatgttcttcataaccctaggtttttaagacatcactaaaaagtgtatcaccttcagccttcatctttccatctggaacagtcctgatgcttttagagttatttgaatcacccccaaaatgggagcgtgtttgcattttacagatgtaaaaactgaggcatagttgctaattatttcgccccatctgtgagcagcaaaggagcttttaaacccccaacacagtctgagtcattgtggacttggtcacaatgtgcagcttatggattgtagaaagggcttcagagagaaagaacaaaggaatcaaggaaggtgagatagcaaagaatgtcgggcagaggctctgctaagagcatggcactgcgaggcaggtggaaaatgaggtgggaaggttataggtggaacttccagaagaaaggcttttcagcccttgggagctgtcattctgtgcagctaagagaggccttagcaattgctaagagaggctgtagcaattgtgttttggggggtgcatttctttcctctttctgctccccccatccttgtgccaagagttattgaggccttaccaggtgccaggctctatgctaataagcatttgtgtagactgactttacacatactatctgatataacaatgaatcgaggagtaccattttctgcatttatttgtatattctatttagaaatctgtttggtggccaggcgcagtggctcacacctgtaatcccagcactttgggaggccgaggcgggcagatcatgaggtcaggagatcaagaccatcctggcaaacatggtgaaaccctgtctctactaaaaatacaaaaattagctgggcatggtggcaggcgtctgtgatccaagctacttgggaggctgaggcaggagaatcacttgaacccgggaggcggaggttgcagtgagccgagatcatgccactgcactccagcctggcaacagagcgagactgtctcaaaaaaaaaagaaagaaagaaagaaagaaatttgttttgtactagtaaaactttaataaataaacaacagctgtctgtatataaatgtgtatattacactgtgtgctgtccaagtttcaaaataaattgaataaaagtacccagtgttcaagtatgataccttctttttccttaagtgaaatatttctagctccttgtgtaatgactctcagtatttccagaaggctttgctcaagatgtctttccacttcttgatgtggtaaaaaggagtggaatgttcatattaaagcttgcctcttttggagaggtgtcccccttccctgcctcctcacttgtcatttattccaaaactacatgaaagcaaagggaaggcccttgctctgaaaagcagtatctgccagggttgtcagccaattagcatatgaatcatacttaccaagggatatgggtacatgtggatcattcacatgacatgaaacagggcctccagaccaaggactggctaagatctgtgaaggtcttaagttttgcccctgattttttgtttgtttgtttgtttatcaatatttgttttattctcctttcttttcttttcttttctttccttcttttttttttttttttttttttttgttttcgacagagtcttgctctgtcacccaggctagagtgcagtggcgtgatctcagctcactgcaacctctgcctcctgggttcaagcaattctacttcctcagcctcccgagtatctgggattacaggcgtgcaccaccacgcctggctaatttttgtatttttagtagagacggggtttcaccatattggtcaggctggtcttgaactcctgacctcgtgattcgcctgcctcggcctcccaaagtgctgggattacaggcatgagtcaccgcgcccgtcctcaagcaattcttgtacctcagcctccctagtagctgggattacaggcatgccaggctaattttgctatttttagtagaggcagggtttcaccgtgttggccaggctggtctcgaactcctgacctcaggtgatctgcccgcccctgcctcccacaatgctgggattacaggcgtgagccatctcaccctgccctatgtgttaataaccatttaaaaatttccaccctgctaagactagtccgtgactctctgtgcctttctccattcttctcttaactaacctcatgtttttattagcatctgtaagacccataaggggaaactgagagagaaaattcaataagactcccttggttttgcagcagtaaggttatatgaggtgtttatgtaaaaggagccccccccccccctttttttttttttttgagacagagtttcgctcttgttgcccaggttggagagcagtggcgcaatctcagctcactgcaacctccgcctcccaggttcaagtgattcttctgcctcagccttccgagtagctgggattacaggcacccgccaccatgcctgactaattgtttgtatatttagtagagacggggtttcatcaggttggccaggctggtctcaaactcctgacctcaggtagtccacccacctcggcctcccaaagtgcagagattacaggcgtgagccaccgcgtccagccaaaaggagcccccttaatcacagcgtttaccatgacctgggtaacaggcatattcagcagacaaataccccgatgatcatcaagccagtcctctgtggtttgcatatgaagcacatcagctgcttcatcaggggtattctacttggcatttataaggggagaggaacagtcccccttctcagggtaaacagaccttagtgtggcttttgtccagtccaccaggctggatgttctctcaggaataacctcctatgtgtctggaccacctgaaacatctgcgattgctccatagagagctgtgggtcctgcatcaacccaaacatgaatgctagcattttgaatactctgcagtgttcgaaacctaagacactgtcactcacttagttactcacacaacccatttgaataaaggttcttcaggaagtttatgatactgatctacaaaatgaaataacttcttcacactataccctgtggtttcaatcgtttcatggtttgccttccaccccacataaactgccttcttggttaccagagttcttagtgatattgtctaatctcagcatgattttgccattggtgggtggctttgcagttactggctagagcgcagactcactgaaatctgagcttggtctgacccagcactctcttttaattttattttatctgttacagataataaccaagggactgaatatatcgccttttcttattagtttgcatttccttatgcttccagtgagccaacaccttggggtagcttttacctttactaacagatctcagcatggtatgctactccgtaccatgagtggctgttaccaatgccatgggttcttgtaatcacccaggatagaaatcaagagcaatcaccatacatagcagcaaagagaaagtttgttttggctcatgcacaagggagccagtgctgagaaaggaaaagaaacagactgctatcggaggatagtgtgtgggttagttttatagggtctttccatgggaaagggttacatcagagcatgtataggagaggcttttctagcactcatgcttcttcatgcatcatatgcaacattagtattttaaatctccaccccatgcatttttagccttaaaatgaggaagggtaactgtaggttggactttaagtctagctatgcatgcagggctccagggaagtccccagccccctgaaataggaactcgtggttaataagcttcttgggtcttttgttattaattggctgagagttagataagttaaagcttgagtgaatggcttctatcattttcttccaggccattttatttatttttattttatttatttatttatttatttatttattgagacagagtctcactctgttgcccaggctggagtgcagtggtgcaatcttggttcactgcagcctccacttctgggggttcacatgattctcctgcctcagcctcctgagtagctgggattacaggcactcaccaccatgcccagcttaatttttatatttttattagagatagggtttcaccatgttggccaggctgatctcaaactcctgacctcaggtgatctacccacctcagcctcccaaagtgctggaattacaggcgtgagccaccatgcctggcccagaccatttaaaaatagggaacccaccagcctgcctatctcatgaccatgtggccacccaggaatcaaagtttctcatccccaacccttttgttctttctcttcccaaaccacatatttctgcaagccagggccattctagcaaatcccacttctgacaccaattgtataggaaaacaaactatttttccttatactttaacactttttcacttctagcaccagatgtgatgggtgagggggtggggtgggggttcccacatcaagcatcaagcagttcttcagttctctttggacaccaactgggtgtgccacaatttaactaaattctgacactatcaagttagcacagaccccactggttaaggcaggggtgtccaatctttcggcttccctgggccacattggaagaagaataattgtcttggaccacacataaaatacactaacactaacaatagctcatgagaaaaaaaaattgcaaaaaatctcataatgttttaataaagtttatgaatttgtgttgagccagattcaaagctgtcctgggccacatgtggcccacgagccacaggttggacaagcttgggttaagggatcagtcccacagtcctccaccacttcagatgccagtgtcaagtccagcttgtcacctgtgcttctgatggaatggctagaaatcagaggttcccatgaccccctgttgactttcatcatttgctagaatggctcacaggactcaggaaaacagtttacttactggattatcagtttatgataaagagctacagatcaggaacagccaaatggaagaatgcatagggtggggcacgtggggaggggctcacagcttccacggcctctccaggcgcacgtcttcccagcacctccatatgttcactaacctggaagctcttcaacccctccactccctatttcccactgtcctttgggtttttatggagtctttgttacataggcatgattgatccaatcattggccattggtgatgaaatcaatctccagcccttctctcctcccctgaggtgagaggttgggctgaaaattccaactctttaatcacagagtttgtttaccagggcaaccagccccccatcctatagttatctgggggctttccagacgtcccctcattaacatgaactcaggtgcggttaaccgggcttgttatgaataacaaaagatgctcctttcacccttattgttcttatcgcttacaaaattccaagggatttaggagttatgtaccaggaacaggaggagaacaggtgtatatcccttactctaagtcacaatattatatggcctgactgcatcttcatctcatgccactcttgcccttgttcacaatgcttttgtccatccttcaaacacagtaagccaatttctgctgcagggcctttgcactgactgctccagctacctgaaagagttctccttcagaattttgaacggctagccccttcccttcattcaggtcttagttcagatgtcaactcagagatgccttccggatcgccctgcccaggccagcttcttcctggtaacctgatcctgtcatcctccatgtcaggggtcagcaaatgttttctgtgaagggccagataataaatattcttagcttcctgggccacatggtctctgtcacaactactcatttctgctgttgtagcttgaaagtagccacagacaaaatataaacaaacacgtgtgactgttccaataagtcttcgaagtttgaattttgtacaattttcacatgtaataaaatatcccttatttgattttctggtcaattatttaaaaatataaagacattcttggcttgtaggttgtacaaaagcaggatttcacccatgagctactgtggtttgccgacccttgctctgtgctatcatcctgttatattttcatcatctcgccgaaatcagaaattatcttatttattcgttctaaaatttgttgttggtggcaaagaggttgaatagaagttataagtaagagttaaaaatatattttaaaattgtcaaagggttttagcagcctatgctgggcctgttaatatcagaactaattagagttagccaagttacaatgcatctctacagtggatatcaatactgtcaccaagtcaactgtctctggagtcagaaaaggcctggttgatgtatatctggcatttagaaagtaaagttgggctgggcgcggtggttcacgcctgtaatcccaacactttgggaggccgaggcgggcagatcacctgacgtcgggagttcgagaccagcctgaccaacatggagaaaccctgtctctactaaaaatacaaaattagccaggcatggcggcacatgcttgtaatcccagctactcgggaggctgaggcaggcgaatcacttgaacccgggaggcggaggttgcagtgagccaagatcgtgccattgcactccagcctgggcaacgagagtgaaactctgtctcaaaaaaaaaaaaaaaaaaaaaaaaaaaagagaaatcagagggccaggtgtgatggctcatgcctgtagtcccagcactttgggaggctgaggtgggcagatcacttgaggtcagaagttcaagaccagcctggccaatatggtgaaatcctgtctgtactaaaaatacaaaaattagccgggtatggtgatacatgcctgtaatccatctgtaatccatctaccagggaggctgagacagaagactcgcttgaacctgggaggcagaggttgcagtgagccaagattgcaccgctgcactctagcctgggcaacagagcaacactctgcctcaaaaaaaaaaaaaaaaaaaaaaaaaaggaaagagaagtcagaatgaatccttttttttttaatgaaataaggggagccaagtaatgatttatattgtggaaagagcttgaaaattatgtttgtaaaagctatttgtcaaaagataaagatgtctagttatgtaaaaaataaaataaaataaataaatgtgtcgtctatctctcctggtagactataaatgccttgacagcaggttcattgtcttatccactgcattatctctatcagtgcctggagaggtgctgtgagaggtcatgtaggaacatttggtgattgaatgagtaaatctacacagtccatgagtcactacttctgataaagtcttccttccagacatcccccatatatcatattccagtgccacaccctgcccaagcttttgcctctacccatctgttcctgtagctgtctctcaagccttcttaactccttctctctcactccagtctctctctttccagtttaccctatagtaaagtacagtaccttgttaaagcttttcttttattatggcatttgtctgcaaataacaaaaaactttccacagtattcccatgacctatggtattctgtagccagactcctcagccggccgtgcaaggcccataccattcagttcactttggcttttccaaccttgtttctgagccttccctggaatgagccctctgctgtcactcccgcatttcctcattattcctgaaactgcagctcattcccacctctgtacctttgctcagggtgtgtcccaggactagttggttctccccttagttgaacccccaggtaatagggggtaagtcggcaatgaatgatgggaaacaggaagaatgaaactggaaggtaaaaagcaaatgtgatcaaacaaggcctaaatggtaatcaggtgggttaagaaggacttagttatcatcaaaaggcacactgcttggtcagattatctagaccagtgcttttcaaactactgtgcaggcaaatgtttggggaatcttgtaaaaatgcagattctgggagtaggtgtggggtagggacctgagattctgctttttttctatctctctcttttgagacagtgtctcactctgtcacccagactggagtgcagtggcatgatcttggctcgctgcaacctccacctcccaggctcaagtgattctcctgcctcagcctcccaagtatctggaattacaggcgtgtgccactaccccccagctaatttttatatttttagtagagatggggtttcaccatgtgggccaggctggtctcaaactcctgacctcaaatgatccacctgcctcagcctcctaaagtgctgggattacaggcgtgagccaccacgcccagccaggttctgcatttttaacaagttcccaggaatgcatgtactcctggttctaggatgactctttgagtatcaaggatctaactaaactctgagaagaggagccttatccaggtggttcgcacctgtagtcccagtgactcgggaggctgaggcaggaggatcgcttgagtccaggagttcgaggctgcagagggctatgattgcaccactgcactccagcctggacaatggagggagaccctgactcaaaaaaacaagaaaagagaaggtgccttgtttatatgacttagatatgggaataggaggtggtgggctgccattaggggactgtttatgtgtcatgagaactccacaagagtcctagactacagtgaagacatttcttgcattctgaacaactgaaaaaaatgtgtgatgatgatgaaagagggggtgctgaaaaccgaggacaaagttgagtgtataagcctgcagcttaaagggaagaaaatctttaatcctagaatggtggcggtgaaaatcgccactgggaaacgaaaagattctaatgttggttgggctgccggcctgtcattacacacacacaaacacactcacacagatgcacacacagaggggaggctggtatgctgtactttcctctgatgcagttggattatctcttttctcaaagggggaacctcttctgatctgctgtaacattcagttcagaatctgtgtccagcttgagtacaagtattggtacttaacctaacaaaacaataggaatcctttctgtagtgtgtatctccaaacagaagaacaggtgggaaaatattttaccagtgtgataaagttgactttttttaacagtttctctaattagcccattccttgtatctttggctaatcagtaactggccttttgattaagttgggtgtcatttcctcatggcttagcttcatgcaaactgcaagttatcctgattaatgattttaatgccatttccttcatcacagtaatttcccctctgcttttatcacagaagaacttctgcttgggtggctgaactctgatcttgacctagagtcatggccatggtaagttgtgaaatacctcaaccctatctggtgccagctgccaacaggtacagaatgtgggctcagcaactgttagcttaaacaaagcattgtttactcaacagaggggaaggaggaggacatgaaaaggcaggtctatttctaaacatcatttaaatttcttttaggggtggtaagcaacttgaccttgaaaactgattcaaagagagaattctttgaattcttttaacatcctgagaatatagaaacaagttgtaattttctgtctgcagaagcgctacatgtttattttagaacatttaaaaaggaaaaactaaaaattctttaggttctaccacctgaagaggactgctatcgatactctgaggtagccacatcatttcaggctcatcaagaggggtgtttcttaacaatatgggtgtgttggctgcctcctgctttagacagtaatcagacaccttggaccttggttatttgctctttggaacaagcatcgaattgaatccctttgagagttctgtaaagttcagctctgaggtggaagctgagcctcttagctgaaaacatggctgtacctaaggctggacatctgctctccttctcttgcccaaatacggtttctgaatagacaagtaattctgatccgtggtcttctggaggaagcaataatagaagtagaaatcttatacctagagaggaactggagagcctgacagcttgagatgccttcctttaggaagatgggtgtgtaaagtaaactatcctgaacaaagagtaatatactcttaatttcttttgcattagatattccagaattttcttcatgatctctgacagtcaaaggcttattcatgtgtgccccaaatctctcatgctttagtttaaaatcattttcttgctgattgattctccctggccatggagaatttttttaaaaatatttacgtatttttattttttatagagatgaggggctcgctatgttgcccaagctggtctcaaactcctggcctcaagcgatcctcccaccttggcctcccaaagttctgggattacaggcatgagccactgtgcctagccaacgtggagaatatttattcagaaatgcttatggtgcccctactttgtggcagatgtgggactaggactcagaattaatgagatgctcttcctgtcttcagcaggctcacagctttcctacaaatgaagactgtaatcaagtggccctttgtgtgctttccactcggagaaaattacctcagttgctctcatctttcctcctaaaacctgtttttctatcatgactattatttattgacagataaaggacattttaaaaagaaaatcacactatacagtcgcaacattggaaacaccaactatttgccattttttaattttagaccttactcatatgtataatgatttttaaataagagtaataagagcataaataatagttttgtagctttccttgtaccccacttagtataggaaaataggaaacaagttattcactctgatcttatgctttatctcttctctatgctaatgagataatgtaatgtttatattacatttcatatcattaaaattatttactctagtggttatgagtgttttaattttcttcttaatttatttttatttttattttttttgagacagagtctcaatctgttgcccaggctggagagcagtggcgcgatcttggctcactaccacctccgtcgtaggtttaagcggttcccctgcctcagcctcctgagtagctgggattacaggcgctcgccaccacgcctgactaattttttgtatttttggtagagacagggtttcactgtgttggccaggctggtctcgaactcctgacctcatgatctgcccgcctcggcctcccaaagtgctgggattacgggcgtgagccaccgcgcccagctttcttcttaatttttaaaaaattttccaaattctctataatattttttaaatcattgtattcaagattttaaaacatgttttatggaggtataattggcatatagtgaaatgcacatcctttaaggttactggtcgttaagttttgacaaatacatatatatacccacataacctactctcatatcaaggtaggacattttatcattcctagaagctcctccatgcccgtttcatattaactccccttcccaccctccactccacacaagaaatgcaactgctgttctgagtgttatcataagttagttttgcctgttctagaacatcctatatattgaatcatagagtaggtactcttttgtgtctgacttctttttctgggcattatattcttttgcaattcatccgtattgttgcatcagtagttttgttcctccattcctttttattgttcattagtattccattgtattgtactctgatctttttggcatgtatcttcttcattattaatgtaataacaatatttcatcaattgtgatatggcacctatttctatctattcatttttgtcattccttcctatatcctctctgtttcctttgcctgctatcacaatgggccctcttgggacagaattccctgtcttcccagaatggataatggcctattatactctgaaattcaatcaatatggatatttatcatgctaacagggaacacatttcttgatctctttcttggagaaaaagagtcattaagaatgctaactgataaacggaaccacccttgccaattcctctatcgattcaccttgttatatattaatcctaatccatagtagtgtcccacagcaacgcagtttgcttaaaagttgaatgcagtgtttgagtgccatccaaaaatttttcaatacggaatttccaaaagaaccttgtgaaacattcaactcagaaagctgtctcatgctggggccaacagccatgttggaattctgacagcaagtcaccaatttgcgtattactactgatatataatagaagaaaagaagtaaagtgcctctgttagtttcttgaggctgccaaaataaagtatttgcaaaagtaattgcaccaacctaatagcacaaactggatggcttagaatagtagaaatgtattgcctcacagttctggaggccagaaatccaaagcaaggtgtcagcagagccatgctccctttgacacctgtgcagaagccttctgggcctcttcctagcttctgggggtttgctggcaatcctagctattccttggcttgctgctgcataacttccatctctgcctttgtcatacggtgctcaccccttgtatgtctctgtcttctcatatccacatcttcttataaggacaccagtcgtattggattaggggcccaccctacaccagtatcacctcatcttaactgattaatctgcagtggccctatttccaaataaggtcacattctgaggtgctggaggttaggacttcaacatgtcttttttgaggggggagatacaattcatccaataacggggcccaaggaagtcgatgtcatacatgtctaccttcctctgtcagacatatagagggtgatgaccaagtgccaaatgcttaccatatccagaacatgaaagcctggtcttgcagcagagaaggcccgtgccctgggtacctgaggacttggatgggcttgatgtgggccactatgggcctgagaggtccaggccagggtggtctagtgcagtaagctcaagtcaggctcaccagagaactgtgctaagggtataaaaatcctccattcctttagatggcccatattacattcttggatccaattagattatcagaaaactttagctctattccacactgtttatgccaccttgtacaaatgctccatcctagattctgctttggcattaccccataggcttgtgtggaggtataatacaagaaatagataaaagaatctcattattttatttattatggaggtacagctgaagttctctttgatgatgatgatgatgatgatgatgatgtttctgagtttttgttttagtgtttacttttttctgggttttgtgctaagtgcattcctgtattatcctgtttctgtgagttattattcgcaacatacaagtgagaaaaatgaaacgtccccaggtcacacagctagaaagaggtaaagataagattcataccccactccagtgcttatgctccttcccactaagcttcttagaccaagcgccaactactccctccttcctcagcctctggacagtgctcgatcctggatttcctatgagctcaaggaccaccccttctcagccatcctttctgggctctccccttttggacctgtactgttggagagacccaggcttatcctaagtccctgttccctattttcactttctttccaggtcatttcatcaagtaccacccaaatgctgatgcatcccgactttattatactggatgtgacctctagacttataccgtataaccaattgtctttttgacaattccacttggatatttaatggacatcccaaacttaacatttccaacatagaacgtctaaatcccactccacactgccactctgaatctggtagtcttcctccagttttctccatctgggtaaatgatacccagctgctcaggggaaaagatttagagttatacttgattcttttctttcctcacctcccacgtcagtccatcagcaagttctgtcgcctttgctccaaaacatgtgctgagctgtctgttcctctgtttatttccatcttaactatttcaccctagtctagctcatatcccacccccagatcttggcccaggctctcaaatggtctctgcatctctctacagcagcccagggggatcttttaaatagataagtcagatcacatgtccctatctcctttctcaaaacctgtcggtggctttctactgtacttagaataaaatacaaactccttacctggtttgaagggctgccttgctctggccccagcccacccctctgatttccttcttttttatttttaattcatttatttaaatatttttattatggaaaactttaaacatatacaaaagtaaacagaatactataaggaacccctttgtgtacctatcaataattattaactcatggtcactcctgttttttgtctttgtttttttgagacagggtctcactctgtcgcccagattggagcacagtggtatgatctcggctcactgcagtctccacctcctgggctcaagagatcctcccacctcagcttcctgagtagctgggactacaggcctgtgccaccatgtgtagctaatttttttgtatgtttttgtagagatgaggtttcaccatgttgcccagtctggtctcaaactcctgggctcaagagatctgcctgcctcagcctcccaaagtgctgggattactggggtgagccaccacatccggcctgtttcttctttatatccacttcctcccctttctctccacctgtgtgattttgaagcaaacccaagacatctcatttcatctgtaaactatttcaatagattaaacctcttttaaaaatgaaatatcaccataatgccattcttatacctaaaaatgttaaaaccaagtcgttagtgtcatcaaatgtcaagtcaatgttcaaatttccatcgtctcataaatgtcttttgctttttactgtttaatttaggatccaaattatggtactacaggttcacattatgatcattgatgttccttttcatatcttttaaactgtagttcccttccatctctctctctttaaattctccttgcaatttatttgtcgaagaaactagatcgttttttaagtgctgtgtctgagagtctggattttgctgactgcaaccctttggtgtggtttaacattctcctttctcctgtttactggaaatttgtttttggctctagaggcttgactggattcaggtttgatatttttcccttttggggagaacagggttccacgttggtgtagtttgtcttccccccactccttgcccaccaacttgagccacactggcctctgtcctgctttccctacaaactagttccggcctcaggacctttgcaggagctgtttcctctgcctgtaacccttgcctccatctttgcatgagcagctgcttcatttcattcagctcttaacctcaatgtcactcctcagaatgggtcctgcaggacctctctatctgcttcacagcaatgctcacccctaggcactttatggaattgtgaattgttggcttgtttactgtctgcctcccatgagctagagcatcagtcccggggagcaagagcttaatttttcatggtcactactgtacccctagcacctagaataccatctaggctatggtcagtgctcaacaaatgtttgccgaatgagatgcctccgtgttggtgagaggctgcctctcagtaacatcactctcttgtgtgctcaggcaaccaaaggaggtactgtcaaagctgcttcaggattcaatgccatggaagatgcccagaccctgaggaaggccatgaaagggctcggtatgtgtcctgctggaagtgaatcctcctgcgtgcattgcacatcacagggtcacacaggagggtgccatgtctgctggccatcacgtgggtcttcctttaataaaacacaagggaggctgggtgtggggctcatgcctgtcatctcagcactttgggaggctgaggtgggcagatcacttgaggccacaagttcgagacaagcctggccaacatgacaagaccccatctagactaaaaataaaaaaattagccaagcgtggtggcacacacctgtaatcccagctacttgggaggctgaggcaggagaatcacttgaacccaggaggtggaggttgcagtgagctgagatctcgccatggcactccagcctgggagacagagtgagactccatctcaaaaaagaaagaaagaggctgggcacggtggctcacgcctgtaatcccagcactttgggaggctgaggcgggtggatcacgaggtcaggagatcgagaccatcctggctaacacggtgaaaccccgtctctactaaaaatacaaaaaaattagctgggcgtggtggcgggcgcctgtagtcccagctactcaggaggctgaggcaggagaatggcgtgaacccgggaggtggagcttgcagtgagctgagattgcaccactgcactccaggctgggcgacagagcgagactccatctcaaaaaaaaaaaaaaaaagaaagagggaaagaagggaagaaggaaggaaagaaggaggagagggagggagggagggaaagaaaacacatggaacaagttgagataagttgggacaaactggatggggaggggcattagttcttcactttaataaagaatgataaatttaatatactcattatggatttcccctattgtttaaacctgctttgaattacgacatcatgaatctgcatattaaattttagaaatgtatttgttttccaattagtgctggtgtgtatatggtgccacagatttacaaagcagtttcacagacattatctcattggatatatgcaacaacctgtgatttagtgaaagcagctattcctattgttattttagccccattttacagatgtgaaactgagacccagagaggccgagtaactctcaccaagtcgcacagtgagtgaaactgagccatggctcacactaggcagatcccatctcaagctcggggtcatcagcactaagtccacattcttgccttgagtccgtctgcttgttgctgtggtgatagacacagctgtgacagcaccgacatgcaatgtgtggaatttaatgtgagaaggctggtgaagcagccttgttgtctggggtaaatactaaggtttttggtgtcatggccaaggagattgaggttgcagacagacacacacacagtgagtttggagcaggagtttaataggcaaaagaaaagaacagctctccatcacagagaggggtcccgagcgggttgccaagtggtagtaaaattgtcagggtttttataaatgggctactgaggagggggctcatgagcagaggaggtcttatcctcctagggtccagtggtttggttgggaccaggtgtgccttctatatagagcagagtttttttaaatcagctcttatcccattctctgaccacatagatggactcttattctgtgtttctttgtcttgcttatctgggagggagagtttctgtgtctgttcccacacatcttcttgcagctgcagacatccacccaagtctgtttttagctcctcaatcttactgcgcctaaagggaaggaatatgcttattaagacccactgttttactggggcccactgtgtaaatgtgaagtttggtgattacccaggagacttccccctccctttctgtgctcaagccatcttctctgtgttttacagcctgaactttcaggctgcttgttgttagaagagaagtgctttttttttgaactgcatgaggttagaaagggagctatttttgagctgctttttgttaaaaggaaagttttctgctggggactcactttaccctaaatgtctacctaaatcatttctttctgcctcctataacatatttcccccctcaggaatgaaatccataactgctgctaggggaaactgggtgacgatttcttctggctacttcctgctggagagtggcgttgtgtggggaacagcagctagggctcctcctggggttgatttaagggtccctcgtaggagggcagtttcattttcggctccattttcagcaccatctgaagcttgatggtttctaagcgagaagagataaacttcacaaggaggtttagaatataggttctaaatatgagtattaagattactattattaatgggggcactataggccgtaaccatgacaacagagtttgtttgatacctgtgagccattcagatgggttgtgctgctgtaagtgggtatatggggcttggctttgtttagcttccttggtcttactttcccaaaaaagggagaaaccctggggttctagtttacctggcaggatttgtaggataattgcccagaactagaacatgtttccagatttttctattaccgatgcctttctgttttctctgagctgcagccagagattcctggttggttgacaggagtaagcagggttagtttaaaatgtaggcaagaacttaaaaacaactgatgggactacaggttaataacagatgtatgataagtcttaaaacataatttctctttctctagtcctcatttttgttaaaaataatctatgataggactgagttgtttgcaaaacagacttcagtcctatacttggcctaattatttgcataaagtacagcaagaataatcatccttacataagcctcttagattggctttgatggaaccttgttccatgaggaattttagataggactttttaaagccaagcccagccataggtttgtacttttaaatacctgtgagttggataaatttttttccttcttgaggttccagaagcatggggttcctaggcctgttagaaagtgacattctttactcactgcaggtcaggaaccctgtatggagactgtgtagacagatatgaggccagttttccccaggggcttttattggctcagcaagttaagcttgattccttaaagggaaatatacccttctagtcaaagccttggtaaaacaaccagtttttccaattgtgttttgttgcaagagaaaatggattcttgctgcactgattcaaacaactatattgttgtaatttaagaatatttataactagtttccaaattctacaggaattaggcagagagacataaacatgctccaaactttgcctatagtagtacactttgcttagttatcaaaggctgtagctagcttaagacaagtttttttgactctaaaaaataaaataaggattagccgtgttctaagaataagtgaagaatattgctttagttttctattagttcagttcattccattaacttttgttttgatatttataaacattttagccttttatgagtcccatacattttttggtcatgacaaacctgcattggagagaacttgttaaagtcccatggcttgattatgaaccatcttttgaagagaattaaaacaaaacaacaattgtctgtaaatgacaaaatgtccagtttggatacagtcagaaatacaattgacaaagaaatttggttatttttgtgtttttcaaaaacccagcataacaaccttaattgtaatagcacatattcagacactagaaccatagacatcccatacagttttggaacacatgttaatattattccctaaagtataacctgaagagtattagacatcattttggcaattttatgtacctcaacatgttaaataatactgtttacctctcttctagatgcttcaggggtcctctgcagcacccaaaagccaggggttaggaaagacagacttgagactaaagtttgactttgggaagcctgttaagtatatttaaaatttaaaacacttgatattatgaaatagaattttagattaccaaaagtttttgtttttgccaaaatgttgagccagaaatttgaaaaagcaaaaaccattcattagccttttctattccatgaaaatcccgtgttaagagagaaagttaaattttacccttgcattagtttgctattaatgttaaacttaattttaaatgaaacattatagacaatcctatttaattttaaccagtttgaccatgaagtgagattttcacatacctgttataacccttgacaagttttgctaaagagtagattagcattttaagaaaaccttgctgtgcttttatttcagtgattaatttacagaaaaaaaccatataatgcccttttgcatttagttaatatgtttacacgcagtgtttttttttgcaagatttttacagtttttttttacaatttgcttaaaccttctactttaagacaattctttatttctaagcaaaatatacatttccatgccctcttataatctttaaataaaaacatcttttactgtttttacacactttccatgtaattccatgttcagtagtttcaatcacatgttataatggtaacttttagtaatttttaactttaatgtaaaacctgttaggttgttttaattatgtgctggatgcagataatgtttgactcctttcagcatagttaggggcttggttgcttccgtatgttcccaggtgctaccaattgtgaagcaggcacgttgatagtttttaaaggctaaataaagaagtagttttatggccagtcgcaatggctcctgcctgtaatcccagcactttgggaggccaaggcgggcggatcacgaggtcaggagatcgagaccatcctggccaacatggtgaaaccccgtctctactaaaaatgcaaaaattagatggatgtggtggcgcgtgcctgtaatcccagctactcaggaggctgagacaggagaatcacttgaaccagggagtcagaggttgcagtgggccaagatcgcactactgcactccagtctggcgacagagcaagactccatctcaaaaaaaaaaaagcagtttacaaccttaaaacatttagcaaactagtatttgacctgcataatttagaccacatttttataccttgaagacatttgtattttaccaataattcctaagactctttttatttttaaagattaaagtcacatgaactgaaaggtaccacagcttttacttttcccttaaaaatgtttgatttaagcgcttatttttcttaggccaattaattagagctcctttttttaataggcattacacaagtaacacatatataaccacacaaacagaagaagatccagcagttataagattttgcatttgccaatgtcccaattggattattggcctctgagtgaggttctttcagaacagagctaggaatacagcttccagggcctaataagcaagcatagccagaagacaaagacgattttgagaggtatttattcacctttaattccaggggctccgaggaaaacagatttttcctaaaatgggatttgtggtgcattttctgtttccccaaggagtcccaggccaccggaagccattctaggtgcaccaagagtggcaagacacagtaaaaaaaaaaagcaattcagtcaactgagaaaaaaaagtttccagatttatgaagatttatttaagaagatttatgaagagaaaaacataaaggccttttaaatatacccattgattggatatccacttttaattaagctgaatgctctttaagaaaatcctttttcattaattaaaactttacaaagaatgcaaacagtaattcttattatttcttttacccagtttgctccacttacctgttcacaatcatgtttaggttctccagttttctctgggagaaagtggctgggctcaggcaagggcaggttttcagctggactgcagatccctttagcagcaaagcttggtatttgaggaggcaattgtttgtcagccagagactttccttagaggacaacagtcctgttacattgtgtggggttaaacagttatttcccatggttaacccagtggcctctgacaccagcaaagcctccactgtaactgcttggaggcaggctgaccatcctttggccaccaagttttaagttccttgcttaagtaactcactggctgttgagctggacctcaagccttagttaaaacttccagggccatttccttcctttttgttacatagagactgaatgctttccccatggaaagactgagggctggtatgttatgttatattatgttatgttatattatgttatgttatgttatgttatgttatgttatgttatgttatgttatgttatttttgagacggagtctcactctgtcgcccaggctggagtgcagtggcatgatctcagctcactgcaagctctgccttccgagttcacgccattctcttgcctcagcctcccgagtagctgggactacaggtgcctgccaccatgcccagctaattttttttgcatttttagtagagacggggtttcaccgtgttagccaggaaggcttggtttagctggttaaaggctttttgagccttaggttcccaaaagagagaggggtgagttttaactgtttgagtttcttttatgaggtggtataaagggtgagccatttccctgtgcccaggtactcacagtttacaaaatccagtaatgcccaagaatttccctaactatcaaaggaaatgggcctaatcctttcctcacctggtgctctggtcccttctgataagaccagaactaggtactttactgaagtctgacagagctgagctttggattttgagactctatactccctttcagctaagaaattaaggagagtcttagcatcttcctgagccttccttgattggggcatagaggaaagtgttatctacatactgcaagaccctgacctgaggacgggaaaacttagaggggtcctttgacagtgcttgtccaaatgagtgagggctgttttgaaatccctgaggcagcaccatccatgttaactgtgtggtctggccggagggatccttacaggcaaacaggtattgagagtcaggatgtaacggtatgcagaaaaaggcatcctttaaatctaggactataaaccatttagttccttcaggtatttgagtcagcaaggactcaaacggatgaattgggactatggcccattaatgaggcagatgtcctgaactagtctccattccccattgggtttttatgctcctagtatcggggtgttgcaaggactgttacagggtctgaggaggccctgcatttttaggttattaataatagcttctagccctttcctggcctctggctttagaggatattgtctctggttaggaaaagaagtgggatttttaaggcggatctgaactggcctagcagttttagcttgacctattcttccttgagttgtccacacttctggattaatgttggctttcactaagggaagacaaagagtttgtcctggggccatgaggatgctggcccccatgtgggctaaaatatctctacctagtaaaggagtggggggactttcaggcatatttaagaaggcatgtgtaaataataagttccccccaactacagtgagagaaatattgggttagagtctttcctgagacacccaccatggttgtgctatgggaagaggggaggccttgattggacaggagaacagagagactggctccagtatccaggaggaagcccaccctccttccttcaatttccagaatcacccggggctcctgaacagtgatggcagtctgagccactggagccaggggtctgagccctaggacctgtcagtcctgccggaccatctgtgagactagttctggacctagtgacctccatatccaggggcagtttaatatccagtggtcttcaccacacgctggacagggtcaaggtggctttttcttgttgcctgggcaattcttcttaaagtgccctggcttgccacaccagtagcaattagtggatgcttcctgaggatcctggactctgcaagcctgcaaagcatctccttgagccttagtcactttctctttttctcctggggctcctcccagtccctatggtaaaagaccaaggtggccaccttcaggagatcttccaaggtactatctggtcctatagcctgtttttgtggtttccttctaatatcaggagctgcctgctttttggctgcagtgagggtttgacttagaagcaacataacagctctccatgtgaagtcaaacacttgagttagattttggaaggtctctgtctacctattagggacatcagaaaatcggcgcaagtctccctttatttttctacagtcctgtaatgagaagggaacatgtaccctaggggtgccccttccatctggcatttcttgtaggggtagaagtgaagctggggcagtggggagctttggagatggtgaagctggagaagctgatggtgcagttggagggggccccagattaggaaaactagaaggactggggcacttagaagctgcccccaatggctcctgcaaaacttgctcttctaacttaggggaattactctccacagacccgcctgatatgattgctaagagagctgagtcaattgtgcagtgcttgctaacgtctgggttgtctcgcggggcaaagaaagcctgtgcataggggaccttggaccatttgctctcctgtctacagaaaagatctaattgatggataagattaaaatcaaggttcccttcagctggccatgtctgttcatccctgagacagtaagaaggccatgcccttctgcaaaagaaaatgagctgctttttcttcaaagttttagggtcaaaggactcccagtgcttcagaatgcactccagaggagtgccggctgaagatggcttgttacccatctgcaaaagagacaagaatagaggtttcctcggtctcctggttcttttcaatgtgactcagggaggaggggacacagtaggagagtcctcctggctgttctccctccttggtccccgggtcccagcaccatagttgcagccccatggttgcaggtgtgacccccaagcgtaataccagaggacctaatcaatgggctagtcatgtttacccatatgacctcagtcctctgcctaataattgggtaattactctctgacctcctagacctgtgtgacctgtgtggcttcttgataaatggatctccggagagataatgtaacacttgcatttaagcaaggccccttaatagagggagtgtactggaatgagctttatactctgctattatggactggactagaggatttattcttaggtggtggttccggttaacttccagacataaaatcccctttctatttagatgccattctagttgtaggcagaatgggtgtcttcagagaacgtaagggtcaaatggtggccttcctgctaacagagagagtactgagactaaaatttggttttggaggacatgttcctccttgctgctgaaagcagagttctcccacttgcagagggggcataaggtttggtctctattagagggatgtaaaagggaggagaactgaaaagccagagacttttagcaaagggcagacaagattcctcatggagaggattcccattttactaggtggtgctagtggaataccaggcagtaactttgcctccatatgctctttaaacaaaggatggagagagaagtctgacctgtggcatgctgtccccacagcatacctcctaacaggagaaagttagtttgcctcatagaggggctatccggtccgactggacagtgctggttcctcacatgggaaaagaaacagcctaagtggacagaggggcatttactggggggaaaataacctcccacccaaccccaggaagtattatcattaggagttaaatagtctttgagatctggatcatggaattcccctgtctgtaaaaagtcagaaaaacagcaatcccttaacctgcattcctggttactacggtggttgctaaacctgcctaattgaattatttcctgggctataaaaattcctgcagcattgcatacagagaggagatgggagacatggtgactgcagaaaggaaaggaggaaaataagatttgcaataggaaaacttggagatcctatggctgacacccagtcaggcaatcagaggctggggtcagtccaggagccttttgaataacaccagggtgtggccctggccagaaattctcagttgctccaggacctattccagccccatacaacaaccaggctttctgtgaaaagaaactagtttggacacagccaacattcccggcaccctgagggcaggtcctccccagcaagcctcacatctgagtcttcaagactggtggccagcccttgtggctccttaatcagctgtcagatgcccggtgtttttgatagttatttgagagaataaaaacggaggacaagaagcctcggaagtgaaagtagagtccgctcctttactcaccattctgatgaagtcaccttcaaatcccagacgagccctcaaaatgaagcagccttgttgtctggggtgaatactgaggttcttggtcacacgaccagatattgaggtcaaggacatgcacacacacatcgagtgagtttggagcaggagtttaataggcaaaagaacagaacagctcacagtcacagagaggggtcccgagcaggttgctaagcagtagtaaaaatgtcagggtttttataaatggtctagggaggaggggcctcatgaggaggggatgtcttatcctcttagggcctgatggtttagctgcgaccaagtgtgctatctatatagagcagaattttttttatcagcttttatcccattccctgaccacataggctgactcttagtctgtgtttctttgtcttgcttatctgggagggagagtttctgtgtctgttcccatacatcttcttgcagctgcaggcatccgccccatgagtctgcttttagtttctctatcttagtgcacctaaagggaaaggaatgtgcttattaagacccactgttttactggggcccattgtataagtgtgaagtttggcaattacccaggagacttccaccccttcttctgtgcttgagctgtcttatctgtattttacagcctgaactttcaggttacttgttgttagaagagaagtgattttttttaactgtgtgtggttagaaagggagctatttttgagctgctttttgttaaaaggaaagttttctgctggggactcactttaccctaaatgtctacctaaataatttctttttgcctcctataacactggtagtgtcttccagcatgctaccctccagttagctccttgggggccaacaccttcatgctgggtaggtacagtgattctatgtgcaccacaaactacctggcctagcctctgcccccaagaccttgtctcagtagacttttggccagagaagtatcccctggttcttagctgctatttagaatctccttgagatttgggtaaaaacacttgaccatgagaccatctttctatccaaaaagaattcattttactcagcctcaatgttgctaacagtaacaacaaccgtagcaataatagaaaatgtttattaagctctactatgtgtcagacatagagatagatgctttccatgggttatctgttttaatcctgacagaagcttgtcttactgttgagaaggtaaagtatagtgagtgaggctggctgacttgcccacggtctcagaactattaagtggtatattcaggattctagataattcctagaacactttcctttcatctttgcatgatcagctgcctcaagtctgattccagagctggagttcaagccactgttctatgctgctgcccatctctgaagagaacattgtcctgaatctatgtatcttcttcttttccctttttcataaaaagagaaaggcataggacccaccttttttttcagtttatcctaattctttggttacaaggacaccataattcaaaatgtagcccatgttacattcagaattatcagcataaagggtgaggagacatttggcacaaccaaccccttttcagtgcctgttatgtgtgggccaatgcaaggcagactgttggagaagacaaggattataatccctagttcttgtgttcaaatagtctatgaatactagcacagctaaggcatgcacaaaaataactatgattaattcataatataacagtgacaggaggggcacaaataagatcccactggggttcaaagagaagagatcacatttcacttgggggcatcgggcaaagcttcttggaggatgtagatgttaaaatggaccttgggagatgattgagtttctgtaaacagaattaagggacaaggtgtttcaggtgaatggaatggcatgtgcggaggtctaggggagtcatggtaaatccacagaaaagtgtcttgcagcagtgaagtggcctcgtctggggtgacacccatggtttgttgtctcacggccacagatatcaaggacgtagacacacaaagagtgaggttaagagtggaagtttaatagggaaaagaaagagactagctctctgctacagagagggattccagaaaaatgggttaccaattcacggtgaaatgcagaggggtttatagatgagctgtggcaggcactgggggttggggggctgatgtctgatctacatagggcaccaaaaaccagttagaaacaggtgtgctatctgcatagggcatgaatctctgacagtccctaccccagtcttttattatgcaggtgggttttcagcctgagctgtactgtattggtcatttctttcttactgtacacatgctaacaaaaaagggaaggtggagtttccatggtggacatgcctggcccccaggtagcccttttctgttggtacagcggccagcattcccttgtgcaagctttcagtttccttatctacgtttgtagcttgatttttcaggctgctctttgttagaaaaaaaaatgattttgggggctgctttttgttacaagggaagttctgccaaggactcttttgccctcactatctgttttttgttttttttttcttttttgagatggggcctcgctctgtcactcaggctgtggcatgcactggcatgatcttggctcactgcaacctccacctcccgggttcaagtgattctcatgcctcagcctcctgagtagctggaattacaggcccccaccaccatacctggctaacttttatattttaatagagacaaggttttaccatgttggccaggctggtcttgaactcctgacctcaagtgatccacccaccccagcctcccaaagtgctaggattacaggcatgagctaccacacccgacctgccctcactatctgcttaaacaatttctttctatctcctgtatcagcaggaggtacttgcaaagcagaagtaggctggttgggagctttctgagaaagcaggtaccagaaggaggttttaggggtgctactgagaaagcacccataagaatcacagacatgcgggaatgacccacaggcactggctgggaaacaacatatgacagaatcatgatgctaaatggagggggttaagaggacatataaaccaatagactggtaatgaagggggtcaggagcctggagtgcagcacagttgggtaaagcacaatatttcaagagctgagtccatgaatttggctgcctagtgtccttttatgtggctatttacaatagtgaatgggatactgtagagagtctcaaatgtcaggctgcagtgcctaaagtaaatccagcagatgatggggagccattgtgtatttctgagcaggggagagacattgtgagagtttttctttttacaaaaatgaatctggcaagactctgggaagaccaaccaggagttaagaatactagttagcagacatctgcacttgtctaagaagaaaccctgaaatcttgaattggaatggttgtgataggaaataaaaagagtgaaagaatgcaaaagaggctgtaaagcaacattttgcatgaccgtggacttgaatgaagaggaaaggagagggtaaaaaaatcaaagctattgggctgggtgcagtggctcacgcctgtaatcccagcactttgggaggcctaggtgggcagagcacaaggtcaaaagatcgagaccattctggccaacaaggtgaaaccccgtctctactaaaaacacaaaaattagctgggcgtggtggcgtgcacctgtagtcccagctactggggaggctgaggcaggagaatcgcttgaacccgggaggcagaggttgcagtgagccgagatggcaccactgcactacagactggccacagagcaagactctgtctcaaaaaaaaaaaaaaaaattgaatctattttgaggatttcagcttggcttgactggggggaagagtgatccctttcacagaaacagggaatgaacaaaaggtaatgaaccctctctgccccttccacaccccctcctagctgagagtgccaagggagaaattgattgttatatggattgtcctctcctttttaaaaataggaacacggctgggcatgatggctcatgcctgtaatctcagcactttgggaggctgaggcaggtggatcgcctgaggtcaggagttcaagaccagcctggtcaacatggtgaaacccatctctagtaaaaaatacaaaaaaaaattagccaggcatggtggcaggcacctgtaatcccagctactagggaggctgaggcaggagaattgcttgaacctgggagggagagggagtgagctggactgcactccagcccgggtgacagagcgaaactccatctcaaaaaaagaaaaaaaaaaaaggaacagaaagtaggtccccaaggtatgtaaacttaaagttctatagcttcctctccacacctcacatctttttgcatctctaaccttgccaaggataactaaagtttggctgtattttttcatttctccctgaaatattttcaatagaatcatttctgaaacccattccaaccccccatacagcacaaacaacgaggaaacagaagattcaccaaacatttatgaacagccagctgttataaagacaagggaccaatctgaaaaatcagaataaagtctccttgttaaagctgctgcaagaaacaggcaagcaaaacttagaacatttttaatttgtaatttttgcttaaagttttggtaagatgttgtatcatggtaatttgtcagcagttctaaaagggaaccatttgtgttcaggaaagatagcttagaagtgcaaaacatagttccagattttaaaacacagtgaatgcagtaacagccaacttaaactctgcaaaatgccaaattggtgaattaacagacaagtttgaattgtttcaaaactcagaggagatgataaaaagataaaaacaaaaaaaaaggcaagaatatggaagagagagagaggagattcaaaagacatgaaaagaattctagaggagatggctgggcgtggtgtctcacacatgtaaccccagcactttgggaggccgaggagggcagatcatttgaggtcaggagctcaagaccagcctggtcaacatagtgaaaccctgtctctactaaaaacacaaaaattcgctgggggtggtggcacagccctgtaatcccagctactcaggaggctgaggcaggagaatcgcttgaacccaggaggcggaggttgcagtgagctgagatcgcgccattgcactccagcctgggtgacagagtgagactttctctcaaaaaaaaaaaaaaaaaaaaaatattctagaggagagaaaaaattactccagccaacatttattaaatgtttagtaagtgctaggcatttaattatattaacacttgcagcagcctatcgagggaaatcactgtcatcattcacatttgcagataaggaaactaatgtttagaaagttaaccattttcttcagtagtaaacagctaattaaaggagaggctaagtcccgaacctagcatctgtttcccaaaaagtagacaaaccctctgaataagggcctcttttcttagaaagccctctgcatgtgtttgggtaactccaatgtccacagaggaacctgctttctcattcctctctcaaatcacacttacctgctgtctcccttcttcccccaggcaccgatgaagacgccattattagcgtccttgcctaccgcaacaccgcccagcgccaggagatcaggacagcctacaagagcaccatcggcagggtaggccacagtctttcctgctctgtctggctgacttcgcagcaacaggaagcagggcctcttcctgatctaggttcccgaagtgaccttgtgttttaaaagatcgatcctttgtcttgtttaaagatgttcttgaggccaggtgtggtgggtcacacctgtaatcccagcactttgggagaccgaggtgggtggatcacttgaggccaggagtttgagaccaacctggccaacatggtgaaaccccatctctccttaaaaaatacaaaaattagccgggcatggtgctgagcacctgtaatcctagctactttgtaggttgaggcaggagaattgcttgaaccaggaggtggaggttgcagtgagccaagatcatgccacttcactccagcctgggcaacagagacagactccatctcaaaaaaaaaaaaaaaaaaaaaaaaaagaatagcgattcagctccttcttcgtcaattgatcttaaacaagttcttaaactctctgacccattccaggaggaaatgtgaataaacatctttagaatttggtccattttccaaataattatatttggaaactatatctcaggaattgagccttaagaaatagtcatgaatgatcacaaagatacaactaaatgccttatgtatataacagtagaaaaatagaaacaggtgactagttaaagaaattaggctgggtgtggtggctcacacctgtaatcctagcactttgggaggccgaggcgagtggatcacttgaggtcaggagttcgagaccagcctgaccaacatggtgaaaccccgtctctactaaaaatacaaaaaaattagctgggcatggtggtgggcacctgtaatcccagctacttgggagactgaggcaggagaatcgcttgaatccaggaggcggagtctgcagtgagtcaagatcgtgccactgcgctccagcctaggcaacagagcaagactccatctaaaaaaaaaaaaaaaagaaattatgttgcacctatctatagaaatctccacagctgctaaaaaggttatcagtgaatattgacttggaagtatattcaagacatattgttaagtaggcaaatacatttacatcggtgtctacaaacatattcacctcaaagttcctttacctcttaaattttttaggacttttggttttgtgggttatatcttttgatatttgccctattagaaactaaaactgagggcatttaaaaatagatatttgttaacttagtaaaaataataagtatattgtatgttactgtaaataacattttaatgaaaaatagctatatatcccaaaacgaaaaaacatttagtgagaagattggcattgttttacattttgcagatctctttaatgtctggcttaatggaagacagatggcttctcatatctatttctacttcaatttgttatgatatgtggttttggttggggtatatgaagaaaatctggcttgtacagatatgtacttgaaaatggggggagtatttgaacagacagttgttgatgcacagacaatgtcaaatagccttaggaaaaccccactgtatgcttgtggaagaatgacagtgaaaaggcaaataacatctgagtgttattctgaggatagttttgacttgcaggccccttgaaagggtcttggagaccccagacatccctggaccacacctggagagtagctggtctaatttgctatagcagttaagcggagctactttcttgcattgcaggacttgatagacgacctgaagtcagaactgagtggcaacttcgagcaggtgattgtggggatgatgacgcccacggtgctgtatgacgtgcaagagctgcgaagggccatgaaggtctgtgctcttcctctcgtgctcttggtgctgttggtgcaaacgctgatgtgctttcttaagaaactgtcacccaataagaaagacatggaagcaacctaaacgcccatcaatggtagactggataaagaaaatgtggtacatgtacaccatggaatagctgtaaaaaggaacaagatcatgtcctctggaggaacatggatggagctggaggtcattgtccttagcaaactaaggcaggaacagaaaatcaaataccatatgttttcacttacaagtgggagctaaatgatgaaaacacatggacacatagaggggaacaacacacactggggcctgttggaggatggagggtgggaggagggagaggatcaggaaaaataactaatgggtactaggcttaatacctgggtaatgaaataatctgtacaacaaacccccatgacacaagtttatctatataacaaacctgcacatgtacccctgcacttaaagtaaaagttaaatttttttaaaaaagaaagaaactatgaccaaggccttctgagagtagcaggtgtaaagtataggagattttccttcatttacgacaacttgaaaacatcattactttacattataccaattataatttaaaagttcttttccaaaaagttagggaatcatttgctccttcctgtggctcaatggggagtgattataattgtcgcttttagtacagctctagagacttttagctatctctagacagctaactacttttgagatatgtaactttatgactgacactttaggggcctccaggtctactataggcttacttctggcaaaagagttcctggcttccctagatgacgtacccactgtgccctagcctggtctgccaaattttaatgaccaagtatgtaatgcaaatataaatggtccccaccttaggatggttctacttaaaaattttcagtgtattgtactcctcatcataagtcgaggagtacaattatcctcctcaaccatgtcaataaatactcagacttgtggaaggttctgggccaggctctgggaaagcaaagaggtgacaaagtctttgccagaaaattctgcccttcagaggaagagagcagaagaggtcaaggaaaaattaagtccccagagggcagaaaccatacctacccgggcacagtaacgaacacataataaacagcctagaaatgtttgttattactcataattgttacggcaaacactttgggtttcgggtgggacaataaaagtgaacaaaccctgttgttagaacgcagtggattgtctttattctctgcagattcatgacagatgtattccttctgtgtctgggcctcagctttgtaaactggctcatatagccctgtcctctggtttcttgtttagggagccggcactgatgagggctgcctaattgagatcctggcctcccggacccctgaggagatccggcgcataagccaaacctaccagcagcgtacgtgacatccgcagtggccctggctgaggtttcgctgtgattagagaatgagggtagcagcgggttgttgtttgctgattagacttttcacagaacgctgagcatgagggatcctcggtgccaagctctgcttcgagggagatccctgtttagccaaatggcggtctgttggctccttaagatttctcaggtgaagatgacactctattttgcctacccagtgcagtattttattaccctaaaagttggaaagttgttccttattatcagacaaagaatctaaggtacttgttcaaaagtggtggcaccagcagatcttagcattccaaggaatggtctggaggggccgtctggcccaaattcttcccttcagactggactgtacgtcctccagccaaatcagaatgacagccattcactcccccttagagacctccagagggtgatacgtatgaagtgcctttaaaaaatgcctgactttttgccctaagaatataactaaaaatgcacagaggttcagatctcacagtgtttattcagcattgtctacattagctaaaaatgcccaagagtagcagattgtctaaacaaaatattatacacttacacaatgaactattatgtagtcattaaaacttatattaaagagtatttttttcttttatttagcctttttttttgagacagggtctcactctgttgcccaggctggaatgcaatggccccatcatagctcactgcaacctcgacctcctgggcttcagcaacccacccactgcagccttctgagtagctgggaccacaggtgtgcgccaccacacccagctaatttttgtattttttgtagagatggggtttcgccatgctgcccaggctggtctcaaactcctgggcccaagcaatctgcccacctccgcctcccgaagtgctgggattacagatgtgagccactacacctggccaagaatactattaaaatatttattaaatggtttggtatatgtaagtgaaaaagacaagccataaaatagtatgctatgatcccatttttaaaaaattaacacagttaataacacagtattttttaaataaatgaaaataatttgtgcatgtgggggaaaatgaggaaggatatttacagaaatgttgtcaatgattcttatttctgggtgattagactgcagtggagttcctcgccttgccccttctttttacttatttgttttttcctaagccttctgtggtcaacatgtgttacctttatagaaagaaaacaaccacaataagagctttgtgggaagtgttcagagcaggagattctaaaccttaggagtctggatttagcaacccaatccccacatctgcccaatgagggttttcttccctgagggctgtgaagggctggagcttctcttttcgtttttgctttttaaaaattaattatgaagaagtgatttttaatttcttgctgaagctccccctgcctattttttttgacacaggatctcgctctgtggcccaggctggagtgcagtggcatggtcatggctcactgcagccttgacctccccaggctgagatgatcctcccacctcagcctcccctgtagctggtactacaagcatgcgccaacatacccagctaatttttgtattttttgtagagatgggggttcaccatgttgcccaggctggtctcgaactcctggattcaagcagtctgccctcctcagcctcccaaagtgttaggattacaggcatgagccactgcgctcggccgtggagcttctcatggataacctgtcagaacctcccaagtgagagacgtggcagagaggcatatgctaggatttgcatttgacagcgctccaaccccagccccacctcaaagctgggttcagaagctcctatctggttgctttccatcagtgaagcagcagaggctgctccacagctgtggttccctctgtgtcactgagaaccacgttcagatcggacccctgggtggcaggaagcacagagggaggatttcagacccagctttttcaaccccacattttaagaaacaggaatatcttggctgggtgcggtggctcacgcctacaatcccagaactttgggaggccaaggcaggcggatcacctgaggtcaggagttcacgaccagcctggccaaaatgacagaaccctgtctgtactaaaaatacaaaaattagctgggcatagtggggcacacctgtaatcccagctacttgggaggctgaggcaggagaattgcatgaacccaggaggcagaggttgcagtgagctgagatggtgccactgcactccagactccatccagcctgggcaacagaatgagactccatctcaaaagaaacaaaacaaaaacaggaatatcgtgtgacaggataagctgatcttgaccattttaccagagtttagtttttgaaaaactgtgtgtggggtgaaaaaacctcatgataagctgcttccataagcaggctggtcttgaggggacagattgctctggagtgtgacagggcattgggcaagactcttaattctgaagtagctaatttcactctcttgctagaatatggacggagccttgaagatgacattcgctctgacacatcgttcatgttccagcgagtgctggtgtctctgtcagctgtgagtgactgcttctgatggggggcgggttttatcgaaatgtccactctatcccctttgccagcctttctcatcctttcagcccctgacatgtggatattccccaggtagtgttctcagacccctctgttcctttatcttatttctccttcagagactctggctaatcctgcctgcccattttttctactttaatttgatatttacaagtacctaacacctgccaggtccccctgtcactcagtgcattgagagttatgaagatgattcagaggcagttcctgggccttaagagtatatattgtcataagggaatacatcaggtacacagttgctagaaggcatgaaaagattacatgccaaaggagaggcgcataggaaaaagaagattcaaggagaaaatttggttgtagaaacaaagaaaagccttcatgacagagatgctggttcagagaggacttggaggattactagaatttcaagaggcagagacgtgggtgggtgtattgcagacaggaagaacagcaagaataaggcagggaacatggggttcagggaacaactgggtgaacagttgggctggtgattctggaaacagggtgggaggataaactggaattctatgttgggagcagtttacacttatttatttgggagcagtagatgacgtgatgatgacaacgatgatgggagtgatgtgactggagctgcactttcagaagagtaatgtaatagtgacgtgtaggatgaacagtggagaggaactggaggctggacgaccaggtaggaagctacctggaaaattccagctggaaaataaagcaggactgagctaggtggggcagggttgcctgaaaagggaagctggagacttcagacatttcacatcacttcccaattgcatctttatccccggcctccttcctgagcttgagactctcatttcacattgctttttagatgtttcattacagatattctactatacccttaatgaactgaaccagaactcattttcccttcaaaccagctcttcttccggacttgcctgtttctgttaatattgctgttgttcctcctacacctaaagaagcagaaccctggaaatcatctccaatttccactttgctcttgtctccaatatttacttagtaacgcctgcctgtgtctcatatttctttcccactttctcttttcctcccatatttaccactctgatgagccatgcctagaccatggaacatcgagacagtataacaataaaaatagcctaaaaactagaggaaagtagcccattttatcatttgttagcattcttcagaggcttccaccctgccttcttgtgagctggtgttggtgaggggtagggggacatttttatgggatcctcaagtcccaccataggtctcatattctctcgactctcctctgttcccaacctccccaccttttttttttttttttttaagattcaaggtcttgctatgtttcccaggccagctcttcacaggtgccatcttagctcactgccttgaactcctggcctcaagacatcctcccacctcagcctcgagtagctggaactacatgcacatcccgacccccttttggcagaggttgatcaatgtagatttgccagttaggaaggcatgagtcagctgggaagacacaggagagtggggtggtgggggaggccaggagatagtggagggagctgtccttgggaagcttctcctgctattggcagaggcactcatgcaacgttaggggccacactgaggctcagccctctaggcacacatcagagccattgtaataatgcgagcgcatttagaggacgtctgtcctccctccctgggtctgaagctccaattcttgtggtattttgtctcattactctagacctgctatcttaatggtgtccccagatcttcatgtatactctcgaattattttttatttgtttttctcatcctcagggtgggagggatgaaggaaattatctggacgatgctctcgtgagacaggatgcccaggttggtagaactgcagcttctttcttccagctttcttctctttcgccaatgagacaggccttagtgggtggatagcaacttatattacagtgtatattagccaggcttggatatgttctttaaaaatattcccacagatagcctttaataacaggtttcttgcagaggtacctggggctggacatcattatataagcactcctgggttccaagtttctcaacattaggaccattgtgtggcaatcccagagaaccactgtcttccgaatcccgtggaggtgaaagggactgttcactgtgcacttttacttcatcaaagaggacatttgataggacctatataaaatagcttgacacagtgtataccctgctgggtaaaattaatagcaaaccccaagaggcatttgcctctctgtttcccagcccagtgatggttgtcctggaaccaacccatggtctaatcagctgtggccagataacactaacgataatagctaataaaaagtgggtcattaccaggtaccaaacactgttctaaaattttttttttttttttgagatggagtttcactcttgttgcccaggctggagtgcaatggcatgatcttggctcactgcaacctccgcctcctgggttcaagtgattctgctgcctcagcctcccaaatagctgggattacaggtgcctgccaccatacccggctaatttttttctatttttagtagagacgggttttcaccatgttggccaggctggtcttaaactcctgacctctggtgatccgcctgccttggcctcccaaagtgctgggattacaggcatgagccatcgcgcgtggcccactgttctaaattctatattaagtatgtcattgaatctttgcaataacttcataaggtaagtattgctatccccattttacaaacaaggaaactgaggctcagagaggtcaagtaccttgctcaagctcagaaagataataaagggcagagctaggatttgaaccaattggcatctagacccagtattctctctctctctctctctctttttttttttttttttttgagacagggtctcactgtcgtccagactggagtgtggtggtgtgatctcagctcaccgcaacctccccctcccaggttcaagcaattctcccacctcagcctcctgagtatctgggattacaggatgcaccaccaccacccggctagtttttgtatttttaatagagatagggtttcaacatgttggccaggctggtcttgaactcctgacctcaaatgatccacctgccatggcctcccaaagtgccgggattacaggcatgagccaccgcgcctgaccatagacccagtattcttaaccaatacataaccataatgagggattggttccattcagtttgtgaggtatgaacaactttgttttatgcaaaaaaaaagaacctgttgctttcattagaggggatagaggtatgtgtgtggcttgggcttcttggagcacggcagctgggtttcaagaaggagcacccagaaagcaagcattccaatagaaacaatggcagttgcatgattgtttatgatctagcctcagagatcagtgtcacttccactaacctgtattttattctttttttttttttttttttttgagatagggtcttgctctgtctcccaggctgttgtgcagtggcatgatctcggcccactgcaaccttcacctcccaggctcaagtgatcctcccacctcagcctcctgagtagctggactacaggcgtgtgccatcatgcctggctaagttttaaatatttttttggtagaggtggggttttgccatattgcccaggctggtctcaaactcctgggctcaagcaacctatctgccttggccttccaaagtgctatgattacaggcatgagccaccgtgcccagcccacaactatgctttattaattaaagcaatgtattagtcagaattcttaagaggaacagaaccaatagagagagagagcgagagagacacagaggggtgtgtgtgtgtgtgtgtgtgtgtgtgtgtgtgtgtgtgtgtgtgtgtgtgagagaaagagagagaggatggagttgggcaagtaccaggatcttcagagggaatcagcaagctggagatgcaggccagcctatggttttgttccagtctgagtccaaaggcctgagaactaggagcagttcccatctgaaggccagcaggctggaaacccatgaagagctgatgttccagttcaagtccaaaggcaggaaaaaaactgatgtcctagctcaaggcagtcaggcaggaggagtccctctcactcttgggaaggtcagccctcttcttgaaaacaaaagctttcagctgattgtatgagggcccctcctccatattggatcatccaaaaaccctcacagaaacacccagaataatgtttgagcaaaaatctgggtaacccatggctcagtcaagttgacataaaataaattgtcacaagcctgttgagattcaagtttcagaagtgctgaataagatgaactcttttgaattaggtgaattagatgaacgctttcagctttaaatttttatgattatgtgaattgactctaaagcagtgagggaatcagagaaagaagtgaaaaaatgggggagtatatggaggtaagcccaatgagccacaatatgtgtgagttaagatctttttgagaaatgtaacaggcaagctgcttattaaaaatgaacagtaattctgattgagcaataatgtagttaaattgagcagaatgagtttcctatattcctacctggttggaatgtaagcaattggcaatgggtccctggttctactgtgagacctgtagcctcaggaaaatcacagatcattctagagcagggctatccaatagaactccccgcagtgatgagaacattccacatctgcactgtcctgtatgggtgactaccggctacctgtagccgctgggtacttgaaatgaggccaatgtgattgaagagctgaattttaaattgtatttaatttcaattaacatttaaacagccacatgtggttagtggcaactgtaggggacagcccaaatctagggcatttcttttagctcttaagatagaaccatgtagtctccagctagggaactgctagtgtttgccctgactcccaggggggtatgacagggtcccaacagccttatgcctgaggaaggatcctgagtcatttccactcaccactaccatttccaaccccatcaccaacaaaataaaactaagccagctcagctctttgagcttctggaaatatttgcctgtgtcctggcacatcgtttttggaattttagacctgtgctttgtttggcttcaggacctgtatgaggctggagagaagaaatgggggacagatgaggtgaaatttctaactgttctctgttcccggaaccgaaatcacctgttgcatggtaaggcacttacttcatttcccaaagaaaaggagtgaaagatagcaaaaactatattgcccataagtagttgataaccttcctccttcagttggtacaaagaactgattgtacccaagtgtcttagattctcaccctggaaatgtattagtccaatgatgtatatgaaagctaatttctgaaagattaattatgaataattagaaaaagtgcatgtagtcatagaagtttggcattcttgtttctaggaaactgaccttcacagtcagtcctttttctaaagtagccccagtattttcattctaatgtagttacatatgaaagtaatctgtagtagatcaggtagcaataaaatagcaatgttggttgatatttattcctgtgtaatatccaagctgtaaagctaatacaagtgatttctttaggggttatgttgtataagatgaatagtggataatttcaaatttgatatgtttctaatttgtttctgataaatataaactttgtaatgtgattttaacttatttgggggaaagatactagacaattttagaatatttgctgtcaggttcatattcttttaaacaagcaagtaaggatataataagatatttcatcttttatacgagttctttagatctttaagtacattataattttataaacccacccaccatacccttttaatcacacacactgatttgcaaagcttgtgggaaatttgagaatgagtttgctaaattgaaaacataaagcaattgagaagtacaacacattctgaagttgtaattatttcaggtttttcacagtgacaaaaaaacaggtgattactcctgttaatcaatatcccgggctaccatcaggtacacaaacttctgactcagcttctttcttcacttccttcccttgcctggttacaaataacaggaatctccccctggtggtgttttccaagaactgcaggtcctcagaagccgatttagtgcataaatgcatttgcaagaattttcacttctgggtacaagtcaatagttaggcagttatgaaatatctgtttgtaagccactgggagaaaatattttaagcactgtttggactaggaaaacttcataattgtcttaccaaccaacaataatggtgagatttcataataactaccgttttgttaataatgttctattttctaggtgcagtgttaagcattttataagcattgtttcttgcaacactcaatggagcagtaattattttccccattttacagtggagaaaactgaggcttagaaaatgtgtcaattaagttctttgattccaagccacacacactgacttcaatttaagtaagaaaagatgaaataatatagaatggcacaggagggaaaatggaaaatactggtagctcacagatttgaacagacagctgaacaccttcaggaagaacagaaatcaaggcagttctgggggtctcagtagaagggaataatggattttatttctaaagcagagtttctgaagttcgttttctattaaaaatgctaaatattgaccccctacttcagactggctgaattagaatctctgagtgtgacacccaggaagtttaataggtttctctgagggtaaagatgatgcagtgcttttggccatccccgtgagctgctcaattaaaaagttcccaggagagagtctaacgggtcctgactgggtcaactgctcacgtgtttgacagaggttgtggtgtatgttgttgggtatggtgtcccttgattgacagccctgttaaaatcacattgatggaagtgaggcagcaccccaaagaaggcgatggtgagaagataaaatagatacctgctctaagaagtttccagaaggagacagcaagagaggggaacatattcaccacattcaaaaatacttggcaaaaaacaacaacaaatgtaattatgtttaagtattttaaaagatgcaaccagctgttattaactgtgactcagttctgaagcagttgaattgttctagttttgatgagccaaaagggagatgacagggaggtgattgccaaggacaaaaacacaaaaagacacattctgcttattaaggaaacaatgagaaaggaaagcaaagctccccagaggccatctccattttatgtgtgagggtcccagataagggaaaggacttgactgatgtcctccaaacatcacagcatttcttcctccttatctggggcccattccactctgcacatccctcctggctgcttgcccacattactaattagtttcctcctgaaatatgccaaagaataaatagtgtaggctagttaaaaatgctcattctctccataaattttagtttcctctgttttttcttcccaataatactattttgttattgtctgcagtgtttgatgaatacaaaaggatatcacagaaggatattgaacagagtattaaatctgaaacatctggtagctttgaagatgctctgctggctataggtaagctggtagggggagtagagaaacaaatgtttatagattttccttctcattatcagtttgcaatatggggatatagaattatttttagagataaaagttgtttatcatgaatcactcatgttacattccagatttttaaacaagaaatattatatacaacctgattgctattgtgccatgtggtttatatattttatatcttctgtgcctttgtatgtcctatgtgaaaggtaataatgtgcagatatacaggctgcagcttgcaagtctgtgaatggttagaactagtaactgtctcatatggcagatacagtaatccttattttgaaatgaaataccaccctttgctttgatagactttatcaattacttctccaggaacttgatgataaattgagggtactttctatctgtgaaaatacatagagcatcgcctatgttcatgaaacattgcttggctaaaatttccctggcaaagcaaatattgataccttgtagaaacagaggaaacaactgtcacttttcttttttcatgggtcttatctgtaatcttttcatttcttctttttttttctttgacagtaaagtgcatgaggaacaaatctgcatattttgctgaaaagctctataaatcgatgaaggtaaatggccttattttcagcatctaaatgaatttgagttatcttgtgtccaccttcttaagcttacttatatcccctatccaaactttgctctgaaagatccaattcaattcatcaaatacttcagtgagtgcctgctaataataatactaggtgatatttactgagtacttaggatgtatggatcactgtttttaatagattaattatatccccacaacagctctatcaggctggtactattactaacctccaatttacagatgaggaaactgaggcatagaaaggatatgcagtttgcccaagattctcagtgaggaagtatggagcaagaatgccaggtgtttacctggcattctagctccagagcccgtattcctaaccctccatcgtactctgcaggctgagaatcacaggaggtgcagggaaggtcaaaatgtagtctttggccaggtgcggtggctcacgcctgtaatcccagcactttgggaggctgaggcgggtggattacttgaggtcaggagttcaagaccagcctggccgtcatggtgaaatccccgtctctacaaaaatgcaaaaattagtcaggtatggtggctcatgcctataatcccatctgcttgggaggctgaggcaggagaatcactggaacccaggaggcagaggttgcagtgagctgaaattgcactactgcactccagcctaggcaacacagtgagactctgtctcaaaaaagaaaaaaaaaaaaagcaaaacaaaacaacaacaacaaaaatgtagaccttgctctcaaagaatgtctagcctaggcaagtatgtgcaaaacaccaattataacaagacagaatgtaagacagtagttgaggatccaaacattgtagaaacacagaggaaagggtttttttttttttcaatatttgttttttgaggtggagaatctgcaaagaatatataaacagttggtatatttgagcaggaccttccaaatgtagaagttttacatcagaggatttcatgtggtgaagggaaggggtgataaggctggggagggaaggataatactccatgagaaggaatcgtaggtgagccaggtggcagggtatgtctggacagcacaggttatggctctagaaaagcagggaacggcatcctgtggtcagaacatagagcattggaaaagtgagttgtggagagccttgaataccatgataaagagtgaggatattcctcaggcctgccaagtagtggagcaaaggacatcgtcagcacagtcatctctagtcttgctttgatagactaaagaagacactgaaaaacagctaggtttttgtatatgtttggatttcgttttcttccttagggcttgggcaccgatgataacaccctcatcagagtgatggtttctcgagcagaaattgacatgttggatatccgggcacacttcaagagactctatggaaagtctctgtactcgttcatcaaggtaggtcacagcagcctaagtccagagtaaaggatccagaaaaggacccctctgaccttggcatttagcacttgttgtccccctcttcttggcatatatcatttcccttaaagattatgctcccgatatttccagtctctcctctttcacacagatatttaaacctttgccaggatacaagctggaaatttgccttctaaatacagtaattattttatgttgacctcagacaaagattacattttaatgaatacttttaagcacacaatttcctcgtctacctaattatgagagaagataaacaactgaatccagagtcctaggcaggggccagctgaggtctgctgggaatatgggaaagcattttagctatcctgaattactgttctttaccaggcaccagacttctaggagtcctaagagggcatggtagtggtgagaaatggttcacctccctcaaagccaggcattcctgggattttgtttcttgaggatgctggaagagtctcatggacatgaaagtgagacagatttccctaggagctaaggttgcctgcactgcaagcttcaaatcagcgttcgatctgtgaactaaatattctgaatcctactcaaagcttggagaggtgtgacaattaggtgattttaactgcagatttttttttttagatggagtctcactctgtcgcccaggctggagtgtagtggcgcaatctccactcactgcaacctccacctcctaggttcaagtgatcctcctgcctcagcctcctgagtagctgggactacaggcatgagctttgtattttttgtagaaatggcgtttcaccatgttggccaggctagtcttgaactcctgacctcaagtgatccacccgtctcggcctcccaaagtgctgggattacaggtgtgagccaccatgccccaccaagctgtggattttgttactacgtctacaaggcatgcaggaacttgtttctatttctgactaggctatgaggtaacttgattttgcagagctgaactatataactagtttaagattcaaggatgacggtaagtgaagttatgggaaaatatactacaaacaagaaaaaaacaaaataaccccaggaaatgacaaatgatttatggaggatatggagagactagaactcttgtgcactgttggtaggaatataaagcggtgcagccactgtgaaaaacagtctgttacgaaactttaagcaccaaacttcttcaaaaagtttaatatagaccaggcatcgtggctcatgcctgtaatcccagcactttgggaggccgagacaggtggatcacttgagcccgggagttcgagaccagcctagccaacatagtgagaccctgtctctacaaaatcaacaaaaattagccgggtgtggtggtgcacgcctgtagtcccagctactcaggaggctgaggtgggatgatcacctgaggctggggaggtcgaggctgcagtgagccatgactgtaccacttcaagactccagcctgagtaaagacccatcccaaaaaagaaaaagaaaaaattttaacatagaatgaccatatgagccagcaattccactctcagttatatacttaaatgaaaacaggaacccaaacagctagttgtacatcaacataaacattattaacaataggcacaaggtggaaacaacctaaatatccatcaacagatgactggataaacaaaatgtatatacatacataaaaagcaatgatattcaatggtacgctgtcatgaaaaaaaggaatgacatttttgatacgtgaatgaaccttgaaaatatactacgtgcaataaatcagacacaaacggacaaatattgtatgattctgctttatgaaatatgtagaataggtagattcatagggacagaaagtagattagaggttaccagcaatttggagggagaggaaagaatgggagttattggttagtgggtacagagtttctgtttggggtgatgaaagggttttagaaatagacagtgatgatggttacataacattgtaaaagtaactagtgccacttgaaaatggttaaaatgacaaattatatatatatatttttttaccacaagaaaaagtctctgaatttgaataaaattgtttaatgaaatgtgaaaagaatagatgaagtataatacttcatcatagcattatttatattatttacatggctttatgttatttatatttatatcaataatatggtattatagtatataatttattatatattgttattactattaatcaatagggaataacaaattatggaaaatccatacaatataatactataccaacactaaaatgattgagtacaaatatattgattggcttgggaagaaaacactataatctagtgtatatatgtctgtatatataaatatgtaaatatatgtgtgtatacacacacacaccactagaaaagattaaaaataaagaatacattactcattcaataatagttgtcaaaagaaatgaaaaaagcagaatagaagcataaaatatgtaaataatagaaaaaaatgacaaaagataaaaataaaagttataaaaataaataaactctcaggttaggtaaaaatataaaatccaacttcatgctgtttataagaaacaactaaaatacagtgacatgtaaaaagcttaaagaaaaacaccagggaaagaaagaaagcggacatacaagaaagaaagcggagattatgctattaataaaaagaagaatttagggagaaaaagtattaaataggagaaagtggatcacgttatactgacaaaggcaacaattcacagcaaagattaaactgttatgaaactttcagtaccaaattatattgcattcaaatgtataaataagaaacttgaggctccagaagaaaacatataatggaattagtatgctagcgagagactttaatacatcctatgctttggcacatcaatgaggcaaagtataaacaaggatatattaagattgagcttaacagatacttattaaactttgaaccctatatacagagattccatcttttctagtccccacgaatgactaataaaaattaatctaggccaggtgcagtggctcacacctgtaatcccagcattctgggaagctgaggtgggaggatcacttgagcccaggagttcgaagctgcagtgagctatgaccacaccactgttctccagcctgggtgatagagcaagaccctgtctctaaaaatataataaaaataaataaataaaattaaagattaaaaaattaatcaattattagaccacaaaaatttatatgcagaaattatagaacctttccggaagactgttttgtaacccatatcaaaatgtttaagaaaacaggctgggtgcggtggctcacacctgtaatcctagtactttgggaggccaaggtgagtggatcacttgaggtcaggacttcaagaccagcctggccaacatggtgaaaccctgtctctactaaaaaaataaaaattagccaggcgtggtggtgtgtacctgtagtgccagctacgcaggcagctgaggcaggagaatcacttgaacctgggaggcggaggtcgcagtgagccaggattgcaccattgcactctagcctgggccacagaacgagactccgtctcagaaaaaaaaaaaaaaaaaggtttaagaaaatgcatttagtccagtaattcccattttatgaaaatttatccagaataaatcattaagaaaatatacaaaaatgtaactacaatatgcttattgaagcagtgtttataatagtgaaaaattgaaacaacgtaaatatccaacaatagggagagggaggatgtgatcaaataaattattttacctgcatacaatgggatattctgtaaccattaaataatgttgtagaataatatttaacaaaatagggccctagcacggttgctcacgcctgtaatcccagcactttttgggaggccaaggctggcagatcatgagatcaggagatcaagaccatcctggctaacatggtgaaaccccatttctactaaaaatacaaaaacaaaattagccgggcatggtggcaggcgcctgtagtcccagctactcaggaggctgacgcagaagaatggcgtgaacccgggaggcagagcttgcagtgagtcaagatggcgccactgcactccagcctgggtgacagaacaagactctgtctcaaaaaaaaaaaaaaaaaaaaaaaaccacaaacaaaaatgaacaaaatagggaaataggctatattgttaagtgaaaaagcagaacacagaatactactgttctatcacattgggtatctagatacatagaaaaaagactggaaggacattcacacatcaaaacggtaagaatagtagtctctagatgatggaataatggttgatttttgtgttcttttttgtctttattttctacactgaataagtattaccttcgtaataaaaaataacaaaaaaaatttaaagctaagaaaaatccagccaagcttgaaaaagttggcttagatgactttgaactgtgtgtttcattttaaaatctatttatctaactttgcttccctatcgaacagggtgacacatctggagactacaggaaagtactgcttgttctctgtggaggagatgattaaaataaaaatcccagaaggacaggaggattctcaacactttgaatttttttaacttcatttttctacactgctattatcattatctcagaatgcttatttccaattaaaacgcctacagctgcctcctagaatatagactgtctgtattattattcacctataattagtcattatgatgctttaaagctgtacttgcatttcaaagcttataagatataaatggagattttaaagtagaaataaatatgtattccatgtttttaaaagattactttctactttgtgtttcacagacattgaatatattaaattattccatattttcttttcagtgaaaaattttttaaatggaagactgttctaaaatcacttttttccctaatccaatttttagagtggctagtagtttcttcatttgaaattgtaagcatccggtcagtaagaatgcccatccagttttctatatttcatagtcaaagccttgaaagcatctacaaatctctttttttaggttttgtccatagcatcagttgatccttactaagtttttcatgggagacttccttcatcacatcttatgttgaaatcactttctgtagtcaaagtataccaaaaccaatttatctgaactaaattctaaagtatggttatacaaaccatatacatctggttaccaaacataaatgctgaacattccatattattatagttaatgtcttaatccagcttgcaagtgaatggaaaaaaaaataagcttcaaactaggtattctgggaatgatgtaatgctctgaatttagtatgatataaagaaaacttttttgtgctaaaaatactttttaaaatcaattttgttgattgtagtaatttctatttgcactgtgcctttcaactccagaaacattctgaagatgtacttggatttaattaaaaagttcactttgtaagaacgtggaaaaataattttaatttaaaaatggtgtttttaggccgggggcgggggctcacgccagtaatcccaacactttgggaggccaaggcgggtggatcacctaaggtcaggagttcaagactagcctggccaacatggagaaactgcatctctactaaaaatataaaaattagccgggtgtggtggctggtgcctgtaatcccagccactcggaggctgagtcagggagaactgcttgaacccaggaggcaggaggcaaaggttgcagtgagccgagatcacgccagcctgggcgacagagcgagaatccatctaaaaaaaaaaaaaaaaaaagtgtctttaaagtgaggtatagtctttctctgatccacttttcaccttctgaggtttttcatcttggcccctgaaaggagctatttttgaaggacttgtgttactcagtttctacaggaattacaagataagaaaaaaaaaatcatatttagtcttatgcgtgcctactggctaatgttcacatatgccaaacactactcaataacataaaataatgtatgaacttattctctggaaatgagtgatgccctctgctctaagtagaccatttatattaaatatcataaatgtataaaggacattcatattctta

SEQ ID NO: 64 - DNA, 29035 bp, Homo sapiens
  source 1..29035: mol_type = genomic DNA
agtctaggtgcagctgccggatccttcagcgtctgcatctcggcgtcgccccgcgtaccgtcgcccggctctccgccgctctcccggggtttcggggcacttgggtcccacagtctgggtgagtggtcgcagcccggggagggggctccttctggagaggagagcgtggtcgcggggcactggattcgcgcggacgctcggccgagagctgtcccggtagctgcgagagggcgggtcggccccgtggcggggccctccgggctgtctgagcgccgccgggtccccgcggacctgcgcttggggagggcacgagttgcaaatggcgcgctaagcccgaggtttcttctcttttgcagtcctgcttcaccttcccctgacctgagtagtcgccatggcacaggtaaggccgtgcgccccccactgcgctggatttacccacaactttgtatgctgcgacgagggacttttaggatttgtctgagagccaaaaagtttaggaggaaagggaacctgctttggggacatcgcttccacttttcttgttccccctttgcttccctgcccccgtttctgtgtcccggttcttcccgctgagcgccctccggaaccagcaccgacgccgccaagctgccttcgcgcgcaacagctggtgacgtggccggatttgtgtgcgctcccttttcatgagtgaatgtgtaaaagtgggccttccccaaaatccagagagtagctcaaattagaaccggagcaagaacagctcatcgtggtcatgtgaggcgaacgcattccccccccaccccgccccccgacttcctttattttttttccgcaaagttttctgtattttaatactgtgattgagcattggctttttccagttgctcagcccagttttactaaaactgtaggacgtaggctctgattttttttttaatccaaaagattaaacacaagcgctgtttttcttaagcaatgaactcgtggaacgagttctcaattgaatttgccttgggactgtttcagaaattgataatctactacaggctttctttactgttttttttttttcctttttttttgagacggagtctcactctgtcgcccaggctggagtccagtgacgtagtgatctcgctcactacaacctctgcctcccgggttcaagcaattctcgtgtctcagctttccaagtagctgggattacaggcgccccaccatgcccagctaattttgtatttttagtagaggcggggtttcaccatgttggccaggctggtctcaaactccttgcctcaagtgatcctcccgcctcggcctcaggactgtaatcccactgcgcctggtttctttactgttattaatgtttatcaaaaatgtaggaaagagaagatagtttaaggtctttaaatattgaccatgttatacagtcttttgtgaataagataccagggcttaaaaactctaaaactgatttcacagatcttgtcaatctaaccggcttgtcagagtccagatagttttttttaaacaagtgttttaactgctaaaacaatgctgtctcttatttatagttcactttttatcagattgacttatcaaaattgaaaaaggtttcttggtcctttccaagtgaaaatgggaggattaagattagttgattactttatgaaacttacacagtgatcccattcttacctcctcttttgcacttaaatgttacagtaaaccaattctcatattacttcaagtggaaagtttggtttaagttcttctccatagaaaggatacttttatgtggaattaactttcctgagtaatatttttcctatcttgatatgctggtgtggtgatgtacatgaagatttaacaagcatcgaataataattccctctatctttgctcatttagcagtttcttgaatctcttgtaagttccccagtgatgtctgagggtccatcaattccttttcattatgtagactgtttacccaaatagtataagcgaacatattttccagttgtggacattaattttaataatttcaaagaatgattagtatcataaaggccatgtgtatagaaaacctaggagaatggtggtttgcatataaaattatgtacctgagccctatgacaatataacaccaagactgttttctatcaaaactacagtttttactaatcataaaagttacaagtaatgttttaaaaaagatacagagtgttaaattttgttctagttttgttactatttttggaaatcatgaaagtaaaacattttgttaaaatatttagtattggccaggcatggtggctcatgcctgtaatcctagcactttgggaggctgaggcacgtggatcacgaggtcaggagttcgagaccagcctaaccaacatggtgagacctcgtctcttctaaaaatacaaaaattagctgggcatggtggtgcacaactgtaatcccagctactcgggaggctgaggcaggagaatcacttgaacccgggaggcggaggttgcagtgagctgagatcgcgctgctgcactccagcctgggcaacagtgagactacgtctcaaaaaaaaagtttagtattaaagttgggtgcggcgtctgagcagtaagaatgtcatgaaggcaaaactaggctacgtaattgttcattagaagcttcatgaacatcagaatttttttgtttattttttatttattttttattatatatatatttttattatactttaagttctagggtatgtgtgcacaacatgcaggtttgttacatatgtatacatggtgccatgttggtgtgctgcacccattaactcaatatttacattagctgtatctcctaatgctatccctcccccctcccccccgcccacaataggccccggtgtgggtgtgtgatgttcccctttctgtgtccaagtgttctcatgaacatcagaattatctctatggtatatgtttaagttacaaggtttgatcagaaatattttcggttggtttaaaattattataataatttaaaaaagccctgtgccgagcaagcaggataaatgtaaataaataaatttgagatgaaactccttccagaggagctgactggatattgattgcatcttttcatgccattcattttttaaagtcaagtctctctggagctaatgttcacttttgggatcttagatcagggttacctgtttacccgtggcctgtgctgctcctggtgatttctcttggttccttatctgtttaactcttaagttcattttggctgctgagaaagaactagatcaaaaactacttggctgctttgcaagccactgagcaattcattggcattcagcaaaccctgatttccttatctaatatccagttctccttggaaggcctacataggtgatcaggctagttacaggcaggcagtccggctttcttcttttaatgacttagaagttcaaaatggtaaaaatataacagtgcttttacagcatagattcattcctgaaatacattttattcatataaccttcatactattctaaaatttcacaaatgcatctgttttttaaaaattagggctcctaagacctttgctttaagtgcttcttagacgcagtctttcagtttagttagtttacataatatgtaaacatatcatcaattgattaattgcaaggaattatactcctggcttcatttctttggacactagttttttgggtttttttttttctcccccgagatggagtctcgctttgttgtccaggctggagtgccgtggcgtgatctcagctcactgcaacctctgcttcctgggttcaactgattctcttccctcagcctccggagtagctgggattagaggcatgtgccaccacgcctggctaatttttgtatttttagtagagacggagtttcgccatgttggccaggctagtctcgaactcctaacctcaagtgatccgtgtgcctcggcctcccaaagtgctgggattacaggcatgagccactgcgcctggtgggacactagttcttaactgttctctttttcatccatgcatgcattcatgaatgcatgaggcttttgcattttcactatgtgccaagtattgttaaacatgagcgcaatgggaaatggatctaagatttattgatataatagatgcattgccaagtcttttgtgtgcattatttagtcctcataacacagttttggaaataggtattactatttttgtttcacagaaggggaaattgaggttacttagctggcattctttgtatgggacaaaggagggaagccatcatacagagaggtaacaacagcaaataaatacttaggggtgtaaaagagtttggcatgatggagtgaaactgcagtgaggtggggaaatcaagccttgtcttggaagggatagaacttttcaagtgttattcatggaatgcccaatggaacaatttggtaaaagagcatactctcctctgaccttcaatgtgaactcatgggaggccaatgccacctgctcactttaactcactcaagacatcactggagttattcttgggcaacttgagcacacaatttaactttccattttattggtgtttgtcaagggaagtcattcttacactggtaaagagacacaacattaaacacagagcattaaagaaatacacaacaaaaatttaaatcattttacaaatcttcactttgttatcaaaaccttcttttctaccacgatgcaaacaacttagtctgttctccagtgatgttttttttcccttgcatttgattttaagaaacaggtcaaaggtggtaggatggatagacaaatggaaagaagcaaaaacaagtaagatggagcatgaaaaggaaaggaaattacacaaaagtaagcaataggccagttcgagtttaacgctttgaactatatcattcactttttctgagttgggattagagcaagggttaggattgggggttgagagcatgtctctgacctctgatgtgtttgtactcctcagtcttcttggaggtcctaattttttccctgataattattttgctttacagctcaaagcataatcaggtcacactgacatttccctcttttatgcccttcttatttttttcttagtacagtgataaataatttattttctcattagcgggaaccattattgcaggaaatattaacgggcctctaatacgtacataaggtagggccctagtgtatgtacatggagtggggaggcaattgtcttcccagcttactgttttttggagtggctccaaggtctttggaaacctgcctcagaagaaccacccttaaaaatcactgcatagcggcttagcagttgctcagcttgtggtttgcttcatgatttccagctcctagttaatattacgtggaatgctggaggtggggggagggtgcggtatttgagtaaatattgattatatggaactggagaacaaagagagtttagtccttttctgtgtcttcaggaaggctttatttaaaatgttccagacaggtgaatactttctcatctttaaacttgaaattgttatttatgtctaagttctgtgtctagaaaagctacccttcccttgttgtttggttggtcttattcattttttttttggcatacctagtccttgcgggtaaagaactttttcatttagagaaaaaaaaagccaacaaaattatagacctaaagaatggatatttttgaaggtgagaattaaaagagtgaattgtatattttggccaagtattatctaagaatatattataattatcttcgtaaggcattggtggtagcagataaagggaattgaggatgaactgaggatgggtgaatgggtgagggaacagtacctacttaagagttggcattaatctgggtaaagtgtggggactccaggaaacaggggaagccctcttgaatgagtcatttaaagtcacatttgcagacagttttgggtgggcagtgatggggtttgcacaggatgtccaaacaagggttctgcccttcttactcatttctctgattcacatctggtctcttaataccgctacgtggctttgctatccttagtggatgactctgactgtatggaatgtagcaaaagtgtttcacaatttctagaaagctctcaaaaagaggactagcagttgtttcttcatgcttagtaggtgagatttttaagatgcttttcttccattcatctttcacctaatttccttcagtctctggtgtcagatatcttttttctttaggcaaatccctcatgtctcttctgtttctaacctctccctgtttttcacctctctgtctctccagaagtttcttcatagcctacaaaccttatcaagcctttttttttctcttaactgtgtttttaaaagcctgctttgcaaactgttgtttcattgagaccgtctttccctcaattcattcctgagtgtcctatagccagactgttaaacaccaccaaagatctcctagttaccaaatccagtggaccctttcactcttagctcttccttgacttcctgtggtattggacactgcctcctctttctttcctcttggaacatttgcctccttcagcttccatgccatcaccctccttggattttcttcttgcctttaggagtacagtgtagcttcatgggtaagagcccaggagccaaggtcctgtggcttcaagtcccatctctgctacttgcttgtttgatggtcatttgggtgactcacttgctaaaacctttctgagccagtatgtttctttgtctgtaagatgggatttccctgagatgatctatgtgaagctctgtgcacggtgcctggtgcattgctgcactcagcagatactagctgccactctgattgtaggtcaccttccctttccttctcctctggctctttccaccccattaatattgtcttgcgtggtggccccctccagctactaccggcgtatgctgacaactcaccaagcctactatggagaaatgcaaagtcagccatcctctttctcatccaaaaaacagaatcaccctaagtagttcctgtctacctggggcctgtttctgtccctgcctttgtttaggtcttcctttccttctttgtgttgttagtttctaagcagtcttcttgtcactcttgcacagtcggttccatcttgctgtgcagagttgacattgttcttccctgcctgagtgtcctccagtggcttcctgttgcctacaggatgaggtctgcacattttagcatggcttttgtgcccttcccctcccttcactgtgacctttcccttgtttttgtttcaaccttactgcttgttccagtctgctgaaatacttaactctttagccaaagtaccaagattggcctggcaaattcacaggcaactttcaagactgtttggaatttttttccgaattttttctcttttcacacttcccaatatagtcctctcaaatgtgctcacattgccctaatccagcctctgtgtgtacatattctactgcacttgattagttatatgcctgtcatttcacacttaacttgagggatcctgacttttaactagtagttagtataatactttggacgggggagacattcaaaagatggtgagtcaatgagtaaaaagacagatggactgcaaggggcattcagtcctaagttctcacattaagaaaacttgtagagtttattcatttttacaatgatactgatcaatttgaagtggtctcattaaagagaagctgtaacttgatctgagagaaagaactttcctaacacaggctaattttgagcatcatcttctcaaatcttatcaatttctcttctaaactataactccttttatgaagttgtcagtattcaaccattcagtttcatatggattaaggtatcgaatgaatggcagggaatctattggtctttatgtatctgtgctccttagatggggtggaaatggagactagcctggctgtgggtggatttccctcttggtggaatgaacagctctggcttagtttcataacctctccacgagacaagtgggagagaggctccccttccccttttcctagttggccacagtcccttgtttagctgaggcacagagggagtgaaagctgctgccagtggtgctttcaacaacctggggctgggacatcaacctggaaacacctctttttctcttgaattatattcttttggcctcatgatcataccacttgacttaggagttaaggtcgtgtggggcttcatgaggtcaggttttctgataagttctctcatagctgaccctgttccgaggaaagaacagtgtgtcttctcttcttgaacaagggtaaggactacagttgaagaaaaagttattctggtggtaaggaagacctcagtcaagaatactacaatgtaagtcatgactgttatcacaggggagagagattaggttcaactctgaatacagtgaagacaattggggatttatagctaacaagcagagtgaggtcagtgcatggaaagttactaacaggaaacatcaagttagggggactcgtgctaaactgacttaataggattcttgctgaaggcaggccaggatgatcagatgttgggggaggggatgaggaaattgatcagatatagagggtgccttagttcattgggctgctgtaacagaatactatagactgggtggcttataaagaaggaaattcatttctcaaagttttggtgactggaagtctcagggtgccagcatggttgggtgtggtgagggctctcttctagacattattgtagcctaacgtgacagagcagagagaggcaagctgtctctggattcttacaaggatgctgatctcattttgggggccctgctttcatgacttcatctaattctaattatctcgcaaaggctctacctcctatttaccgtcatgtggtggggtagggtttcaacatatgaattttgaggggacacagatattcggttcataacagagggtgatcagataccaaaagtaggggtatcctccttaaactgacttagcaagcttcttgctaggcaggcaaaggaggcccaatgacaaggactagttgagaagagggctcaggggagcctcttcaaagtgtggtcaaagggagagtctttgtcactatctcctggatccatgagtgccactttttcaggaagcctaatttagtgccactaaagagagaaggccactgaactgacctttgacactatgccctggggaagttcttcaccatggctatctctctctgttgtcatcttttaaaatttgattagtattatgttattgttggcatagcaacaattggaggctaagatggaaaagaaactttcctcctttttggtgactgtgcttttgtgcatttataataagacatgtaagattgtaaacgaggctagctttacagtccttttagctgtttgtttctcagtttagatggtacctaagcaggagttttgagggaatgtaaaaacatttattggtaaagtaaattctgggagcctccatttagcgtaagataaacatttatggctcagtattaataaagccttatgactctcaggatctaatgatatcactaacttttttttttttttttttgtgagacagagtctcgctctgtcaccttggctggagtgcagtggcgcgatcttggctcactgcaagctccgcctcccaggttcacaccattctcctgcctcagcctcccaagcagctgggactacaggcgcctgccaccacacccggttaatttttttagtagagatggggtttcaacgtgttagccaggatggtctcggatctcctgaccttgtgatccgcctgcctcagcctcccaaagtgttgggattacaggcgtgagccactgcgcccagccgatatcactaattttttttgaaatacgaagatattttggttattaaaagcagtgtatatatatgataaagtaatgtgtaacaggaagctttatgaagaatgtcttccaatacacctttataaagttctaaattcaaagatttgtattcctctggcacgtgaacgatcatttcaggctttgctgggttatcgtaaagtccctaagtatgtatacagaaacaggacttagatcaaaaggcacgtaacaagagcactgcttaaaattgagtactcaggatagggtattaagatttagtgcgggctcagtatgcttgtagatcaaaatggtgtgagacttaatgggaagggaacctgcaaagatgtgccctctgtgaaccaggaggtgttggtggggtttcgtcacagagaagagggagccagccttcccactgatggtattacaggtgatcaggatagcttctgtgctgaatcggccatgccaattcccattgtaaatggttcccttcccagttcaaaaggggtcacaaatcttatcaaatggtaaatttatttaatgactgaatatgatatatagcaagcggcttcctgtttgtgttatttactttgtcatattagtcatgatatgaataataccactgtgtttcgtgaattaggttctcagaggcactgtgactgacttccctggatttgatgagcgggctgatgcagaaactcttcggaaggctatgaaaggcttgggtaaatttagcttcctctttctaaagcaaatgtgatatttgtttttccaaacaagtcattaattacagtaagaataattttagaatattttgatctgaaatctgtaggagaagagatatgttaagataacaaaataatactataaaccagagtgtccagtcttttggcttctctgggccacattggaagaattatcttgggccacacataaaatacactaacaataatgatagctgatgagctaaaaaaaaaaaaaaagcaaaaaaatttcataatgttttcagaaagtttatgagtttgtgttaggctgcattcagagctgtcctgggccacatgtggcttgcaggccatgggttggacaagcttgctataaaccatccctaatattcagtctctagaactgaacaggcagttaaattcagcctctgtgcttttgagcttgtcaccctcacctgtgtggtagaggcccgagtcgataaggcagccatccctgcaggtgggcagctgtgcagctctgttcccaatcagatatcccattctcattctgctagactcttctctttccccagcctcttttctagtcatttaaaaacctctcatctcaaggatttccatgtgtcactgatctcctgtgctcaggctccttttgtactactgttcatgtgctttctggccctgtaagtccttccattgtatccagcccaccttttcagactcatctcccattactgtttaatgtgttctcagacccaaccatcctggcttatctgctgtttatgaaagccctgtatttccccactgctgagcttttctctcattctaaacgctgtccttcctttcgtcactgcctttcacaatccttccatccttcaatacttgtgggtgtcaccttctccatgaatcattctccaagattcccttccacctcctatcagctaggagacccttctttgagccccatttaacacctagatctctcctgaggcacttgtcacattttgccttagctcatacttatttgtgtgtttttaaaaaactaggtgccctaagttttttaaaaggcagaagtatttttccatctacttcacaataggttgggaatggggggtagaatatattggaaacgtaacattttatatattgtaaatttttaataaactgtttaataaaacatttatatatatgtgtgtatttgcgtctgtgtgtgtgtgtgtgtatatatatatgtgtgtgtgtatatatatatatatatacatattttttttttttctaagagatgggggtctcactatgttgaccaggcaggtcttgaactcctggcctcaagcaatcctcccatcttggcctcccaaagagctaggattacagatgtgagccactgcgccggccataaaatatattttatattcgcatagggagaggcaaggaaataaggtgactgggaagcgagttgccaagatcgttgggagagtatgcatgtaggagccaaaatgtaattgttaaccataaattgcaggcacagatgaggagagcatcctgactctgttgacatcccgaagtaatgctcagcgccaggaaatctctgcagcttttaagactctgtttggcagggtaagaccacacttcatcccaagagagaatgggagaacagctatcagttataagactagtttggaatatactgatattcttttgtaagcatcatttattttgtgattccgacttccctacttctgtttcttttccactctcctctaaattatcagctcttaggatacagtgctcacccagcttatcctcacataattgtttttccttgcctaatgctgtagaggtgccaaaagatcctgtagtgagaactgtctctcttcttttcctctgtgtttcccactcagcattcacatggatgtcttactatccattttctaggtgtaagcctgtattaaaatatgttttgttttaacacagtcacagtcttggttccttttgtcatgattttaactaatgggtttttaattagttgatttaaatgcttttatttgattaataattcaaaaaaatttatttgaattatttaaatgaattatttgaattatttaaatttaaatgaattagtgcatgcatggaaaacttaaatgtagtcttgttattctgaaaacgtatgtcacttaactaaggaaacaagtgcaaagcaaaaaagaaagtattctaaacaccatttttagttgtgtggtatgctgaaacttataggtaggaaatactgtgttttttttttcacaattacataattttttcataattacatacacaatttccccataggaacagatatctcccagtggtcaggagtcataacaatgactataatctattatgtgtttgaatgttattacatattgagagaaaagaaaaaattattacgtttgggtatgagagactaaatgttgtcctttgtaaatttcattatatgattattttttgaaattacaaagaagatatgtttctcagaatagtatttttataaaatagttttagactacttttaaaggtattcttttttttcaagttaagaaaaacatcttttagaaacaaatatcttgacgtataagtgggtttgctttagtttaagattttggtcacaggttaaaagtatgttattcaaggttatagggttttgtttagctcatgggccttctacttggagacagcaacataaagaattcattagagcaaaggactgtcattcatatttaagaagaatcttattacaatttctgctggttaacaaatttgtattttctgtgggttaggatcttctggatgacctgaaatcagaactaactggaaaatttgaaaaattaattgtggctctgatgaaaccctctcggctttatgatgcttatgaactgaaacatgccttgaaggtaaaaaggatgagtgaaaggaacattcttgcatagatagtattattttgttttggtaattacttcctcttatttgttatatttaaaaaattttatctgattatttcagtgagagttgcttggcagacaaaactgggaggcaataagcagtaaaggagggagaaaattacacgtgtgtcatttcatctttttgtagatttaaactcaataatactgggctgtttaaaattttcatatttttatagctttttgtattttattttcatgcctgtcttctgattttgaggatgtttaaaaaatattacagatgagctattttatctttttcagtagaaaattgcctgattagggaaccataatattgctcatcattttaggttaaaaggtaaagcttcagagagaattttcaagataaatattttctcatactctttccttctttcctgcccctctaaacactaaaatgaagtagctggtaaacttgctataatttcagttgcagcaaaaattaaatatgtattcccttgactggtgtttggaatgttgtataaatatgaaggcattgacacatttgtttaggctcatgggacaggaagtagttcagttgttagctgttagattttgaatgggcacattgagatttaacaaggaaataatgtttctcagggattcttactgatggagtggagagaggagaagggtcatcctgataggagctggtttgtgctcagtctcttcattttcctatggtgattcttttggaataaacaaaaatctgaggttattgagaaaagcactttttttgctaagtacttctgaaatgtcagcagtagttgaaattctgccagagaatgaactctaggtttttcagtgcttgatttttggcaaaaaatagaaatataaagaaaataaggcttcaatatactatcttttaaaaaaaattaagtccagctatatcgttgcatctcttagtttaatcatatagatgtgatttttaaaagcagaaaaaggaaagccaactaaaatgatttttcaaaaatccagaaagcaagtcccaattcctttatactgttctaattcctaataattaagtattgctatatttattgttacctttgatgtagaattttcctgtgactgcacagcacttaacttgggggtcaggggtttatcttttgaggtgcttattaagtatcagtgctcttccatgtacatttacgtgaagttttcatttttactctttcggtttttaaaaaattacttcatgtttcatgaaaatgttttacttttaagctagaattaactgatcaaattaaaagttacaaatttatgtaactggttatgtatacgtacacatatatacacacatacacatgataaacattgttttccattaggcaaaaagaataaaatggtctttggagagaaaatcatttaaaacttgttatttctataactaatagaactcatatacaaagaaatccatgttatactggataatatttatataactatgcaatttgggtaacatctataactttcttttaataactttctttttaatcttattgacatgttttctctattaaaatctccaaacagggagctggaacaaatgaaaaagtactgacagaaattattgcttcaaggacacctgaagaactgagagccatcaaacaagtttatgaagaaggtaaatgtttgtgagttatattttgacttcacctccactatcacttccttcatttctgtgatttgaatgcagtcctttgtaggtatgggaggcacgcagtaaatgatggatgaatgaatgaatgaatgaatgacctgcaattcaagctatttttctccttcagtaaggaaaagactgccttgttatcctctactattttcatattttataagaagctactgctgaagatggagtttacttttgcataggatttgcaattagtgtagggatatacaggttgtctttatgttaacattaaggtaaaaatggtttttcctcctttaaaaatatttagctttatgctagcaaaatttaggagttatataaaaagtacttttggaactttggaagagaaacctaaaccctttcccacatcagagttgataaagtacatttgagtaaatgtatgttgtcttagctaatggcagtgcttgaataaaatattctgcattttgatttttctttttagtgtgtcttttatatgaacagaaatctgcatttcggcctaaaatatgtctcatgaatagaatcaagaaaatgaagtaaaaagtagaggtagagagtccttttcttaccagatttcttgtagccaactctttctcctgcctgactgaggagggtcagactatccagtttctcagctcagtcaacagactccaagcctagtgtcttttgctaggggctgtatcttgccattagtttgttaatcttagaaatggctttgttaacccagcaagtcaaaacagcaaaaaattgtttagagcaactgtataattacctttctaaagggctgaatctctctttcctgcttctctttttataggcagtaagttcccaaccgctaaggcagaagtgatacatgtatctcaactttgaactttatttgatgtactattcaaagatctctttctggggatgttgacgttgatgagagcctttgtgctactggattacaaatggtgtgctcaaagggggtaataactgtgtggtctgtcctactcagccgtgtaattgagcactggctatgtgtctggcagtgtgttaacaggctgtcatgagtgacaaaaggtgtgcataacacagctcctgtcctcaagcagtttgtgtgcagtctcctcagtgggtgacatgacagaatgactgcaatatttaaaggataatgaaattcaaactaaagtaaaataccaatgatgttaaatgcaataatgcattcagaagagagaggtcatcatagctttggatgttagggaggcttcatggtacaaatcacacatgcagcagagtttcaagactaggtgggtttacaaagtgtccattgacagatgaatagataaagaatacgtacacacacacacacaaacacagacacacacacacaggagtactgttcagtcttaaagaggggaaatcctgtcatttcaacatcatggataaacgtggaggacataatgcaaagtgaaataagctaggcacaaggcataagctatgcatgatctcacttcttatgttgaatctaaaaaaattgaactcatagaaacagatagtaaaacagtgtttgctagggtgtaggggtggggtgaatgggagaagggactggtgaaatattggtcaaagcatacacgattttagttaggcaggatgaataagttctggggatctcatgaacagcgtggtgactatagtgaaagtataactattatatgcttgaaatttgtgaatacagtatattttaaatgtcctcaccacacacaaaaatatagactatatgaagtgatggatatgctgattaacttgattgtggtaatcatttcacaacgtacacatatatgaaaacatcatggtgtataccttaaatatatacaatttttatttgtccatcataactcaataaagctgggaaaaaaagactaggtgcattttgagtaggtagaaaagatatttttgggtgaggtactgcctgtctttaatggcatggagactggactgtggagagtgtattgagggacggagagggcctggctgctgtggaggatgtgtgcatgtccattgtgggaggtaaatggaacaagcgaggttaggctcagatatagatggttttgcatgactggattaggaatttggacttaattcacaggcactgtaaattcctgaatgagcagtggagtgctgaaggaacaattgagggaggaaggagatttgaattgagaggctaattggatagttatgtgtgtgggaggtaagctaggtatttaggaattgtggcccaacctaggtgagtgagaggtgtgaggaggataaatcagggacaggagaaacgtgataggatttaatggttaatatttacaggtgttggtgtagaagaaagaattaaagattcctacaaggttttgtatttgggtaacttgttgaaataaacatgtaactcttctgggccttttaaaatagaagtttcaggcttttaaagttcgtttgcttttgcataataattaaatatttaaataccttagagtaaggcctcctttcctttaatagcatctgtttgagagtagtgagaaagacttgtagactcttgtagatcccagttctccccttttatatgggcttacattgagcagctggaaatagaggtgggaggggggcctactttaaaatatcattgctgtctctcaagagttaactttatttctgcagaggaaaaataccttattaggagtgatggccatgcccaaagaaataaatctcagaatattagagatagaagacatttggaagctaaccatataaaagatttgaaagaaagcaaaacagagtttaagcttatgattgattgtgttttggagactttccagtaccatcatgtatctatagattaatgactacattggtcgagagaatttctaaatggctgagtcttgatttaagtttgaattgagtgcctttgggagactttaattcatttttgtccaaccactcactgaaagcatttgcttagagcattcagagatggaatagagggaatttatgttaaccaaatataattatttcttcttttacatcgctttcatttgattaatggggcaagattacttttctagttgaaagaagatgtaaataagtatgaaattattttgttgcagaatatggctcaagcctggaagatgacgtggtgggggacacttcagggtactaccagcggatgttggtggttctccttcaggtattgcgtggagattaattacagtttgattaaaaagcctgaagttggactgggctgaatctagttaagtaaggtcacttaaaattcttttaataatttgtggtacttgctgattcttactgcgatgattctgactgtatgttgcctgtgcttgtttgtgtttcagaatatctggtctaaattcttaacagctaactcatacatgttttagatagtagtatcttgttcctttcatagaatgatagcggtatcttgttctttcatagaatttaaaatcagtagggtcattattggttttggacagtgctgggtgatgataacgtgaaatagtgcaggattgatcttaataaaagcatattattcctagagaaagagtgttattgaataaccatcaggtggaaccatttttccttttgaatgagaatgctctatagttcagtaatgtgacatattacctctcataggctaacagagaccctgatgctggaattgatgaagctcaagttgaacaagatgctcaggtgagtgacaccaggatatgatgactttattatgctgtagaaatgaagaaataattcatggtaatgaaaaatcacaatgtatgttgtaatagcttctagtgataatcttgttaatgggttatttacatagcataagacctacataagtagctttttcttattctgacctggtcagcaaaatattttaccttaaagctgaaacgaaataaaataaattatatagtgagttccaactagacatgtttttttttgtgattattgaacattcacaaaatagagaattttaccaaaaaacagtgttattacttccactgccaattatgcagtgggtctcttagcaggagaagataaagaagaaagaataaagtatttaacagtaagtggtgtttaattacataagagatgacaagttattttggtattaggaaatttctctgcatttccttcgacagaattttaagtaggattggtcttctgtcagcagctttttagtgactccaaatgaaaatttcctcttaagtgacttataaacccctataaagtctcagtctggttaataaaacagttattaaaatataggaaaggaaatttgaaacatgagagctgaaaactggaaattggtaataaaggaattacttgggttcctagaaccaccaatcatagacctctttctggtcacatgtttcaattaagagaatatacaattcttggttgtttgtcatgtatcattgaaaaaggaagagccatattcattcctccagtggaacaacccatggatatgcgatctcactttgctaacaggaaagaggagagcggttattcttttgggtaggttgattttataatggtttcagaatgctgtcatctctgtctagctggagagaaaaaaagaactgaatgtttaccgagggctctctgtgcagtatttgactcttgcttcactctgtcttagaaaatgcaagccaattgtgtccagccccttcagactctggtggttccattgccctcaggataaagtccgggttcctgaatgggttacaagcccctttgttatctgtgtgttgtttacttatgcctccagcctctctcacatgctctctctgccctcttgcccctcccaccccgcttcacctgagtcctcttcaagagtcagtcttcagcttagatactttagagttaggtgcccctcacagggaaaaccatacccccccccgcccccaggcttcctgtcacagttcttgccacgttctctggaagccatctatttacttcactgccttcctgggccccctgagctgtcagttcaattgtatcctcagcttctggcatagagtaggtgctcagtaaataactgatgaatgaatgagcacataactctaccagaaaggggcaatttcccttttatggataaagaaacaaacccatggcttccactgaatagcagtggagttggaattcctaacgaggcctgtctgactccaaagctctttctctttcactagaagatagtcagtgttattgaatattaatatttcactataagaatatttcactgtaagatattcagtgttcttgagtattagtgccttccctgattttctctatcattaaagggcttattaaatatcaactcaagcatagatctagcttaattccaccttctttcgggaagagggctagagcaaccctacagagttgtactcctgttaggggctttgttcagtactgaggtgatcttactgctttccaagcattggttgtggctttgctaggagatagtgctgattctctcattcctactgtcaagagtaggataggagttctgggagcttttcagggtcacagtgtaagaaaccaactctagtcctctcagatgtctgcagtgaggcctgcattcacaggcagagggcagatttcccagcatagttggtgatgtaatgagagcattgctgcagcacgaggctcctgaggggaaaacagtacattttaaccttgttttcattgatttctgtccttggagcacttactggatagcactgctgctcaaactttcatgggcatgtggcgcacctgggacctttaattgcagattctgattctatgggtctgggcaggggctgggagtctggattttgaacatgctctcaggtaatgcctgcattcttggtcctttgattactgaggctgtataggtgacacttacgtgtcatgcagtggatataaccattcagaaccctgagagtacatgtgagactgtacatgtgaaaactgctttatggagttactttaaagtatcccttgaatggaatccaagcttttcttagccttccagtgactaggagcaatacagaacatgttacactggctattatttttgattctttcaaatgtattattattaattaataaacctgttgaaaacaaataatcttttggcattataaaaaggaacacaccaacttgtacctcgtagcaagggcagctggactgttatcactagtgagaatttgagatttcttaattgagagtaagctgagacagctaaagggctcttttataagcttttgcatttttgtctctactgatacctggcactaagaagatttctattatttgagaggtttgataagccatagtgagtcattcacttgggaactgaacgttttgtagataatccactttttaacatttttaatgtgttaaattgatttaatacttttaatgcattaaaacagatttaccttcttccccagtaaatccttgttttattctttctctggagggagagttgaactcttagaggaaagagggagaaggagaagtaatcaggcactttttacttttactgggcatttgctactgattacctgacactgttcagtgcattatcttagttatataatctccgttaatgactatatacactgaggctgaagaggagattaagtagttcatctgagatcttgcagatagaccacatctgttttgactccaaagactcatcctttgcactgaaccagggcttatgaaactgtactcaggctgaaccgtaaagcttagggaaggggtgtaagggtccctcatccagatggatccatgaatattgggcatcctcatttaggagaaaggatacttagattaaaacaaaactgttaaatatcattgttttacatgaagaagccatcattattattgcatatgattacttaataatagttttacagtagatattgatcccaaacataattctcccaagaaaattaaaacattgtggtaaaaataactgacatctcaccaattattcccatataacaggcttaactcctgtacctactagagaacatttctagacatttaaaacagttgataagaagtgtgtgcatcaatgtctgtgatattgtacaagatgagtcctttacccatttaggtgttaatgtatttgtatattttatctacatgtagaaacataccagaagtagtaactagcaccctcaggaaattgatattaaatagcaacttttcttttctttcctttctctttcccctttctcctttttccttttctttccttcacctttccttcccctcccatttccttaccctcccctttccttcccctcccttctccttcctatcccctctccctcccctcccctctccctcccctcccttctcctttccgcccctctccctcccctcccctcccctccctcttcccctttcctttccttcgtgcccaggctggagtgcagtgccatgatctaggctcactgcaacctctgcctcctgggttcaaacaattctcttgccacagcctcccgggtagctgggattacaggcatctgccaccgtgcctggataagttttgtatttttagtagagacaggttttgacaggttgcccaggctggtcttgaactcctgggctcaagcgatccacctgcctcagcgtcccaaaatgctgggattacaggcatgagccactatgcctagcctgcaacttctattttcttatttttgttctttcttagttttataaaatttctcaatgaacttgcgttgtttttgtaattaaattttaaaagttattttaagaaaggtctgtgtcatcatgatatagttctaaagtttagatgcatgcatgactttcagagttactgtcttttcaggttttaagagcatgttcacatggccagaattgatattattcatttttatctttaaaataattaattttaaaattgagcataaagatacatgagtctcatttttttcttattctccagaaatataataaaaaatagatctttaccaccataatctacatttttaaatatactgtgatcaaaacttctatattcaagcctgttattatcacttcctgtctttatttggattgctgcttgtgggtataaggccaactgcaagtagcagcctcagcaaattgcattcatcttgctttaatatgtagacttagtttgaaatgaataaaaggatagtacagtcattgtaaaggttgattctttgggttttaataaattattctcacgtcaataagtggattcagagttaacgttgatgtttgtatataagcttatttttttaggcagctatacgtgcacaagaaagcatattttttccccatgtcaaaaaggaagtatgggcactcaaactattcaaccactacttattgagtgcttctatatgccaggcactgtgctatacccacaatcttttaaaaatttattgtgatctttggaaatatgaaaacattttatagctagccttggttaaatctcagttgtaaagagaaaatatgaagtgtacttttactcatgtgctattgaacagctatagaacaagcaaaacagaaaaggcagacaacttagcttccagttaaatcctttcccagtctatacatggatgtatcaacagtgaggtagtcataactttctcctgacccatactgttgcttctgaaagattggaggttatggcagacattttgggaacatgtaaccttgcaccattgccgtgctttgttgcttggacccatgaatcttctgtggcacagttcagtggcaagctccaaaggtgctccaaactcagtgagctgagtttcagagtaggacacattagaaatgaaaactattaatacaagatgatgaatcaagtgagttaaaattcagggagtaaaaaacaagtgtgtttaagaacctggaaatgagatggaggaacaatttattaattgagtttgaaatttttgcaggctttatttcaggctggagaacttaaatgggggacagatgaagaaaagtttatcaccatctttggaacacgaagtgtgtctcatttgagaaagggtgagtgaaaaaaatctgtatggggcagatacattggtaaatttggaaagtgcatgagccagtgtgacagaatacctgctacatagcagggacttagagaatgaatcagtttttgtatttcttccttttggtgacctggagaaatctcaacattgtttttgctgctgttgtagcttttacaaactagagatcctgagtccacccttcactattggaggatggcaagggaggtcagttctctagattgttcctctcatagtcacacatcactgaatagtggctcactacacgtatttcctcctagaggttggtacccaggaccttatctctggatagtcatcagcacttgtggtatcagttgggaatgaatttagtgcaagtgacagagaaccctaatagtggctttaaaaattgggctttttttccagaggtgggattccatggttgatttggcaggacctgagatctttctggtttttctttttgctccattatccctagtgttttggttttctttcttcattatcataagatgtctgctctagctccaaacttaaccatttcacagcaggaaggaaagaaaagggtaaactagtcctatctgtgtatcactttttgtaagtgaggagatttctcagcatcccctccagtagatttacctttaggtctcattggctataactcgtaagggggctggcaatcagtgaacaaagtatatttacaatccattgcttagggcttggcacattgaggctttgagcacaaggttctgtcagcaaggaagaaggggagatttgtgttcagtaagacactacctaatcaaagtaaataccatctttctggaaagagtgatccctacatgattagggaatcatttttattttttctagtgtttgacaagtacatgactatatcaggatttcaaattgaggaaaccattgaccgcgagacttctggcaatttagagcaactactccttgctgttggtaggtgatttacaatgtattgatatttttggtggtaagagctaaagcattttattcaattgaggctgcatctgaaaataaccacctaggtgtgaaggaagagcttgatatgatatttaggggaagcaaactcccaaatttccaattcagaaatttattttgatgttggaaatacaggattgtctggttagttcatctaaatcctatggaaatactaagataattgtttaaaaatcattttgaagctgcattaaaaatattatttattgataaacctgaaatgtcgtggacattatctcagaggcttgtaaacattatttctgatacctgtggaattttagaatttttttgaatactgttctctcagctttgaggcagactaagaaattgtcatctggtttagaaaagaagaatatctttgatgtaatagaagatgtgatgatggttgttttcaaattaaataatttagttttattttaattaaatattcagaataatctggaaaaattggagaactgaatctgtgcagttgattgcagtattatgtactccaaagctagggagaatctagtttgtgagtctcctgtggtccttttgttcatatgggtctgcagtgagcctctgtctgctgtttgttccaagtatttggccttgagctcacacttttgtgctctctgtcttcaggagactaagctaaagatctgcatgaaccaactctaaaagtagcctttcacttgagtacacagttaatgtacttttaccagaaaacttttagacaggtccttcataattagaatacgcatacaaattaagacattttcagttactggtggctgtttttcttaagacttagaaaagggagaattaagaaatctccacatgcaaggattatttttgtatattaaggaattttcatgatagattttctgaagctaagcagactgaggtctgagcagccccaacctacattcaacatgtacatgttcagagaagagatcctttctgatattgatttatctgtttttgtactgaaatggataaatctcatgctgctctgtgtgaatcattgatattaaagaatatgtagagagtataggaagatcacccaagagtttaaaaaaattaggtagtaatcttgtattatttgctttaatgtcttggaatgaaaacttccaagggatttgtgtaatttattggtgatgaagaatgttgtggtattatgataacaatccaggctgcccaaactgcagtatccaaaaagtcttcacagaaccaaggcgcatagaaaaacctgtgcccttattctccatgcctttctatgcagacctcagaactccaaggaaaacctaagccagtgtctaagaaaatacttggtgagtgaggaaatcagattagcttacagctctttagcctctggtacttttgtgtttttatagaagtagagctataagcaggaagcagcacttgatttttaattacttaatcctttacatatcaaaatagcatttgaccattgtattgtttattttcttagtgaaatctattcgaagtatacctgcctaccttgcagagaccctctattatgctatgaaggtaagtggagaccatgaaccttctatctaatacatttctctttctaattattattcttcacttttgtttatgttttagatgatagaccttgggaatttttcccttataacattcaacccagttctactaaattgttataccttattgattcacccgcacccgggagcatttgatcctatgtttgaagtttttaagcattttgcttctctctttttttttttttttaaagggagctgggacagatgatcataccctcatcagagtcatggtttccaggagtgagattgatctgtttaacatcaggaaggagtttaggaagaattttgccacctctctttattccatgattaaggtagtagaacctttctttaaattacgtttgggaatccaaagcagactggtatgttgcatgaaagacaaggataagagaacctgattcttgtgttaagtttaaaattttagtgacacgattagagcaatgagttaaaaagcttagcataatgtttcctgaagtagagatgatggctcccaagtgaaagcatgggtattgatgtggctgaggctcttggtgaactcagaagcattatttagtagtggtaacagatgactcaacaaaccaaaccccttgcctatgataataatgtgttctttctgtcttttatcaattccagctgtctttattagtccttcttttatttcatatcagcttttcctttctttatcgtctgttatcaccttatctctgatgctggtttctaattcaggaaagagccaaccaggtcatattgggagtaaagagcccctaggtattagtatcatttttgttctttttaaaacaaggtgctctgtggcctataattacatttagcttaaagtcttttgactttttttttttttttccagtaaaggttaatgtggaccatgtgcaaagcaagatttcaattgagcagaagcttttagtttagcatgtttgtggtttggctggcccaaaggacactagagagtttacccatgcacttttagcttgaaacattaatttatcatgcatgtctgcatgtgagacaagcagatgcaaagcatgttctgcccttctgtctcggagggagagccatgacagccctgcagccccagcactgcccgtgttagctgatatataccaagtgatagaaactattctgtctagaaggcttgatttgactatagttgttaaagttgcctgattctttgtgttaccagagggaatactgagtgtctgaggttacattggtaggaaactccctgcataacattcctgatgtgaaagtcacagagattacccacttgggagaagagtcttatgaataaaatttgttgccagttatttagttttaaaattttctatggcttctgtgagtcatggaggttaatggaatacatttggtttcagggagatacatctggggactataagaaagctcttctgctgctctgtggagaagatgactaacgtgtcacggggaagagctccctgctgtgtgcctgcaccaccccactgccttccttcagcacctttagctgcatttgtatgccagtgcttaacacattgccttattcatactagcatgctcatgaccaacacatacacgtcatagaagaaaatagtggtgcttctttctgatctctagtggagatctctttgactgctgtagtactaaagtgtacttaatgttactaagtttaatgcctggccattttccatttatatatattttttaagaggctagagtgcttttagccttttttaaaaactccatttatattacatttgtaaccatgatactttaatcagaagcttagccttgaaattgtgaactcttggaaatgttattagtgaagttcgcaactaaactaaacctgtaaaattatgatgattgtattcaaaagattaatgaaaaataaacatttctgtccccctgaattatgtgtacatgtgtgtttagatttattattaaatttatttaacaatgtt

SEQ ID NO: 65 - DNA, 57074 bp, Homo sapiens
  source 1..57074: mol_type = genomic DNA
gcggttgctgctgggctaacgggctccgatccagcgagcgctgcgtcctcgagtccctgcgcccgtgcgtccgtctgcgacccgaggcctccgctgcgcggtgagtgggctgaggctggagaggggagtcgctctgggaaccccttcccgggggctgcagggacacaagaaataagcgcccagtcatcggctgatgggtaccccccgccaggagcagggacgggagggcgcggtaacccgagagtgtcgcagactgggtgtgtctggggagcgcagcggagcaaatctggggtcggggcggagaggcgcgggcggagggcgccctggctagggggaggggagggagtcccgttgctgcagagggtctggttgagggtcctgggcgccggagctgagccaggggctggtcctgccggccttaatttgggggggctcaagagactttgaaggtccggggttggggtcagctggacgccagtcaaaggacccgcagagaagggtgtggctgaggcccaagactgagagcaagagcgttggaccctccagctgcttataaaatggcttgtgtgtggtgtcgggggagggctgcctgcgtgcagagagctgaacgtccggtcgtacatacctcagggcctcattggaccccatcccctttgggccactgcttgtctatgaatgcagtctcccaacggggctccgaggcctcctatggtgaggcaggggcactacccttctttctgcatcccctaagcggtctaggccttcccaaagtttgggggcttcaaataattccccatataccagcatgggagcaaaataccctgaatcggaatcccagcccctgttgcagtgtgactttgggcggtggctttccctctctgagcctggatttccttctccaagtccatagttgagaaacccagtctctttcaaaggaaacaatggctttgaaaactgatttatttgtcagctgtatggaatgattgcaggtttgggagtcttgattatagatttgggaagcctggcacaacccttgtaggccctacaaggggaaagggcaggaggtcctttgggacaactaatctggccacggcttcctgcctcctccttcctttccctagattctagtgggtcttctctgacaattccaaatttggacatatggctcccgggtttgtgaaaggactctggtttccccccaagagtccgcccttttccctccattattccttcccccttgcccaaaacatgcttgggattgcttccactgacccagatggcatatcctgacctgcgtagcccttcatggtgaagtgaatgaccgccccagtttcagcccctgtggaccctgacctcctagcaggcaggccctgagccacgccgagggcactggcctggggtcagaggaaagcccggttacagtccggatgtgctgggacttcttgagcaagccctttctctaaggctttgtgccccatctggagcaaagtctgctgaactggctgccactgccagtgcagacattctaggattcaactgttctaagatttaggattctgggagttggatgggactggggagggcaggaggcagaggctttcatccccctctgcagctgtgacaatcactcatccatctttctttgccttatctaccctttgttcctaaggcagcatctgctgagatacagaaaatacttgcagtttctggataagggccacagctgttgctggggcaaaatgtagatgtgagtgtgcagaggaggggccagggaagcccaaggcctggcctcttgagactgactcctgggatgaagtgggggagactgcagtgctggatagctgccagtgactggcacatccgcactgcagcatccagagggagccctgggccaccaggatccagcctcggacccagcccctgccctgccactaatcagctaggcgccctgggcacacctactacccctctggggcttagccccttcctctctacagggataggacatatacccaggacaccccactggtattaataaaatgggttgggtctgaatggcttttgctctaccattctaggattttctggggaggcccagtggaatcaccagcctcaccccacccagcctctccgatatacttcctgggtggcgacaaagcacaggatgtggtctctaccgtgattcctgagcatgcatgcaccccttctcctgccaatagaggggaggaagtcggaggggtgtctttatgcctataaacttgccttggaatccagcctcactccctttcctcctggagttgagaagcccccacagagactggctatgggggagtgactgtctataggttccttggatgtcctgcctatctgcaaaatgagaatgagatcgataccttcatgaggctgtaagatggcagatataaaagtgctgtgttatctcaaaagggtgtggtgcttgagaaggcaggcgacctgagcctcaagttcctcttctgaaaaatccatgtcctggtggtccttaaataatagcaataaaatggtaaccactattacctctcgaacccttaaatttgccaggccccggctgaagccttgctatgttagacgctgttattaatgcctattttgcagacatggaaactccagcccttaacagtttaaggaagaaataataatgacaaatgcttataaaatatagtgcttcctgtgtgccaggtcctcttctaagctctagacttgtcttaattttttttatcctcatcataactcctatgagggaggtgctatttttatcccttttttttttttttaatatgaaacaggcacagagaggctcaatacttgcacaacaccacacagctactaaatatcaccctcaggcttcaatctcaggcagtctggctccagcatctatactgtgagacactactttgctgcctctcacaaaagtgacccaagctggggttcaaacctaggctagactagttccaatcctgaggcagagagatgatctcctgaggccttgtccagtcctaggatcaatggttctgggtcaggagaggaaaagacactgctccctaagaaaccccagtcgtcaagctggggggtgtgcccacgcacagagccagggaaggcatttaccccagcttcatcagaatcaaggctcctggagggttatggagcgggtcctgggtgtcttcctgcagaccgggggagaagccagcaagaaagggcaaagagggaaggatctagattttataggccaggggccttctaagtgggatggatataccccaggacgcactgaagatgatcttttgggggtacaggaagaaactattggactccttattaaatgtacttttaatgtcatattttaaaggtatatttctgtttatcatggtaaatactcaatttttctttggttatgggttgtgtatgggatcaatatatatatatatatatatatatatatatatatatactgcaaactgccatatgacatcaccttatcaccagctttgtggggccaggagccttgtctgtctcattttctgttcaacccccaacttctaccagtgggcctggtttgtaggaggtgctcaaataaatgtttatggaaaaacacgcccctgcttgatgactgattttcttctgatgttgggtaagtgacttaacctctctagtttatctcctggctatagaaagaggagtaaagcacagtttgaaaaccaatagtagatggttccatttgctgaggtcactaaagaaagcatgaaagccacttagtgcattttacccccaaccatccataggagccacgccctatgggagggggtgcaggaaagaggcatatgcagtaattttctaaaaagtgtaaaattatgactcatgcagatacaaaaatgatcatgtgctgttctacttattaatcaatgaccacaccaggccgatgttataaccagctcaaaagacacatttgtattgaaagaaatgtgcaattagagacaaaactctttttttacctgagggggtgggaaatcaattggacctttacaaaatagggcaaggagtatgtattagaattactttgtgttaccatcaattatttgcaacttactgacctgtaaaatcactcaaagacaatgaaagtctcgagtcagacaacctggagggttttcctttgaagtacagattctttcccataataccttggaggctggcagcccttatctaatggagaaatgataaatccacagtggttgaccaaagccagtcaaatcaaggtggtttcagagcaccctagcgggggaataccttctggcttgttagaaaaggcggcatttgaatccagcagataacagtggttctcagcctccttggctgccattaaaatcacctaggaaagtttttagaaattaccaaaggccaggcctcaccccagcagttgagtcagaatctctaagggctgaccttaaatctttggtagttttgaaaaattccccaggttctgttagtgaagctagaattgaaaagcactggtatagattctggaaagctggattaaaaatgttggtggaaggcgttcctggtttagcagggaagacagggcaaagaggaaagtggtgatggcaaagaagtcagtaaggagaaccaatggcctcgactgctgagcttagaggcccagtattaaggggcaccattggagacttgtgagcagaggagtgctgtggctcaggctgtagcccctcaggcactcccctgaggcagaggtctgggtgggtttttttgcatgattttccatattatttcttttttctcaaatcaccctcccaccacacctggtttcacccccttacgctcaacatctcctttccctcaaaagtgtactctgttcctccacagcccaagctacctttcgatgacagaaatgctttttcttaccctggtgttactattcttcctggcatgcccctgcctccattccattgaatccagattttgactgtgcacctctatcagcctgcacccctaatattttctttaactttatacatgtataacaaataaaaatgggacataaaagggcaagattaaaacatttggaaagtggtgatactcttgtcctgcaccccagtggattgtcatacccattacccctttttggagactactgctgtaataatgatgattgtggcaacagaagtcaccgtttgttaaacatttaatctgtacctggccatgctaagtgttttacctgccttatttcattgaatcttcacaaaaaccttacaagagggtcatttcaggatgaagaaactgaggcagagaaattccataacttgcccaagttactgagctcggaatttgcatggtcaggatttgaacttgggcatcgaccacaaatcctgcattgattctaatgccacattgcctccattgtaaatgtttgggcttattataataaaagccaccatttattgagcctttactgtgtgccacgcactgtgctaagtgttttccccccgttacttcatttatttctcagtacctataggtatttctatctgcattttgcggatgtggaaattgagattcagtttaagtaacttacttacatcacaaactgctgggcaacatctgtgcctgaaggcccatgccttcacatgacttggataaaacccttcccctatccacatctctgtggttgggcagtggtgagccgttccttctagagtcagcctggaactctcgaaggggaaggaggaaaacgtgattgattgcaggcaaaaggatgaggcaaggggtggccacagcagcacaaagccacccaggccattcattctgctcctgtgtgggtttcacgaatgatcagtcatgataagtcgtcacagtatatctcatctagatctgagagaatcagggttcctgggaggaaagaggcacaggtctggaatgaccctgtttactagtcttgaacagctctttcaaccaaggtgatgaatgttgcatattggcgggtggagatggggaggaatcctgtggcctgggagatgaccctcctaggactgatattctgctgtgaaaatcctgagttgaagtctctaaaagcctctaactatagatcctaccaaagagggagtgatgtattgtcccactttagagatgaagaaactaaggctgagagagggatctggcttgcctgaggttacatgggggcagactgggaaccagaaccagggtcttattctttggactcttcctggtgtcccattgcagccaagacccacagttgtgtggggacttgttatgatcgagggctgctaggcagagatgttggctgcttcctgggccctggcaagtcactttctctttctgagatgcctttaccccgtctagaaaatgagggacttggagtcatggattattaagggcccttgtgggattcagaaacactagatgtaaaatattcagccaatttgagcagtatggtctaggttgctctgggagggatcagaagccatcttaaagccagggtaaatggtgtgtttatgattagctcaggagcttcccagaaccctcagaggcggggctgtggaatcagcagggggactggccctcagaactgcagtctgaacatctagttctggaaggagcttgctttttacatatgaactgtgcactcacacaaggcacacagaaactgctctcagagctgagaatattttcccaaacagtaagaggcccctccttgaagccatctctccttggaaaggggagctcctccagatgggcctgggctgcagccagcagctgaaattgccagcaacaagcccagaggaaagtgcttcaaggctggagatgcaggtgacaggcctcagccctccctctgtctgtgtcaactaacttcctgggtctcattcagtccctggttctctgctagccttgggcttccttcactgtctccccctactatcccccaggtcagaggaaaccgagagctggcctccagcctcatcccggggtagatgtgggccccctcctccccccaccacacactggaaagggggtacagtttccatttcctggtgagagctgcacagttgtaccaaggggcccctggttgccagggaaacagcaaggtttcctgaagctgagctgagctgagctgcatttgcaggcagatccgtcctctgccttccactcccaaccccatatgatgactgtcctcagctgactgcagcttggggaactcataatcagccagtgaagacacagaggcaaacacgacagaggccctgtcctcaacttcccaccagcacagtaaatatcaccatttactaagaacaggtcttgtgcctggcctcttatgtgctgcctttgacataacttaggtcttatcctccaacaaccctacaaagcagaaaagggaaagcttcagttttgtgcttgagatcaccttgaactcaaaaatgagcaataagcccacggtcacatggctaagattttccctaagtcttgggggaacagggaatatgtggagaactggaaggcattgagctgaaatgtctccatgatttctactctcctagttctgttccttttaggtcttactgggtaaatctgattgactttgttatgtttacttttttttttttttttgagtcagagtctcactctgttgcctagcctggagtgcagtggtgccatctctgctcactgcaacctctgcctcccagctcaagcgattcacctgcctcggcctcctgactagctgggactacaggcacacaccatcacacctggctaatttttgtattttttcgtagagacggggtttcgcatgttggccaggctggtctcaaacttctggccccaggtggtccttgccgcttggcctcccaaagtgctgggattacaggcatgagccactgctcctggcctctgttatgttcacttttaaaaagcaatacatagacattgttaaaagagatcaggccaggcttggtggctcacgcctataatcccagcactttgagagactgaggagggcagatcacaagggcaggagttcgagaccagcctggccaacatggtgaaacccatctctactaaaaatacgaaaattagccaggtgtggtgccgtgcacctgtaatcccagctactcaggaggctgaggcaggagaatcgcttgaacccgggaggtggaggttgcagggagctgagattgcgccactgcactccagcctgggtaacagagcgagactccatctcaaaaaaaagagatcaaattgcccagacctgcttaaagtggaaagtagtggtcctttgtttctcttctccttctcttaagaagattgttaaactttcatctgttgccctcctgagtgctcattagccagctccctacctgcttctcttatacttcccaaatcagttacatctctttttgcatttatttttacgtatcatatctttgttccttcactgtagaccctgtctcctgatatcctccacccgcattccttatccattttcaatgagatatgtgtcctgttttcctgtgtgttcctgtctttttttttttttttttttttttgagacagggcttgccctgtcacccaggctggagtgcagtggtgcaaccttggctcactgcagcctccacctcctgagttcaagcaatcctctcgcctcagcctcccaagtagctgggactataggcatgtgccaccatgtccagctattttttttttatttttttttaatagagatcgggtctcactatgttacctaggctggtctcgaactcctgggctcaaattatcctcccacctcagcttcccaaagtgccagaattataggcatgagctaccacgaccagcctgaaaaatccagtctttacagtggcctcaggcaccggtctcagatcctacatcctaccacaccactccctgctaccacaccagccacactgagctcgtggtggttcctcacttgcaccaccccgcggtgtgccccagtcacactcgtgagatcctctgacccctccacctgggactacaccccttgtcactttcctgaccaagccttgtcttttctctgtagttcttatctcagcctgatgagtgcatttgttattcattcccattacagcataagctctagagaaacagaatttaaaaaattgctcatatttctgcatgcacagtgcccagagcaatgcctgactaggataggcgctaaatgagtgcatactcacttgttcaggaatgacagtccttcagatattgcagcaggtggttggaagcactttgagtcctatctgcaggcggtcaagctctgggttctgaagccatccttgttgacttgaaaagggggcatgcatggtgcagatagtatagactctgggatctagaaattgttgaattcagttctaagctgtgtgatcttggctcatttattgcgatgctccagcctcagtttcctctctataaaaaaggagaatctgatgtgtggaaggatttctgagagtagtaactgagacggtgctgagacaggtaccctgcctagtgtggaggagtcaaggggtcagtggtgggtcagtgccatgcccgccctcccttggggatccgcgtccctttcccatactgctgtgaatgtctggacaccatctagtctgtccattgtcttctgaaaaaaatgtgattggccttgagctgggtcattgggtctgatttaacctgaagggctgggggcagctggaaaacagcagagggaggaaatgtaagggaaagaaaggggatggttagagttggggggaatctcacatgctgtctttcttctctacagtggattctgctgcgaaccggagaccatggccaaaccagcacaggtaaggggcctctctttcctgaaggtggtactcagccttctctgggcctgggatcctcctggagccactaggcctgctacagagacccctggtaccttcagcttgaaaaaaggaggaaaggttcttaggctttgcttgctcctgttacaagtcatggctcttcagatgcaggtcaccataatgtaatataacccacaatatcctaagcagaaaaggatgtgtattggcttatctgacagagaggcccagggcttcaggtctggttgaatccaggggtttccaaatgatagtgtcaagattctgcctgtgtgagctgggcttcttccggtggcttcattcttgggtaggttcttccttgcattggcatggtagtcatcagcagctccaggcttccattctgctgtcttggcagcccagggagaaaacaacataactcatgcccagtgattccaggggaaggcccaggtctggttctcattggctgtgcctgagtaacctgttctttcttggagcaaggaggtggagttggtcccacctgaactgtttggcctgacgaagggaaatggatacttgacaggtagaaagacatccttgttgacttctctgctctggatatagaaatgttctctgtcacacccatttgggattgaatttccttggcttgggagactctaacctcagtctctcatgtctgactgttctgccgggcaatagaattggaggcacctgagaacttttactcccatgtggctgagactaggttctggccatggtcagaggtaggattctgacctcgactgtgctctgttgaggctgggcacggtgactctcacctataatcccagcactttgggaggctgaagtgagcagatcacttgagcgcaggatttcgacaccagcctggacaatatggcagaaccctgtctctagaaaaaatacaaaggtggcatgtacttgtagtcccagctgcttaggaggctaaggtgggaaactcacctgatcccaggagattgaggctgtgatgagctgagatcatgccactgcactccagcctgggctacagagcaagtctcaaaaaacaaaaaaccccactctactctgttggggtttgcctgagggtgctgtctgttggctggcgttggagaaagccatgcagtcagtgtgacgatgggattggcagggagaagaaacttggggatcttgaagaaaatcatgggactgggccccgttgtcccttactccaacccagaactactggccacagaatgcacagacagaagctgtctgtgaggtctttgggcctcatgttccccttacggaatggttgaattcagtaataataaaactccatccatccttgacatcatgactgcccccagtgaacctgggcttataggatattcacagtttctgaagagcacaggatgttataggatcagtaccctcagagaagtcctagctgtggccttcctcacagccactgaggagtatactgtgtgtacaagtggcctctctgaccaggaggagaaaatgttactgattatgggcaaaaatccaaggtggaactttcactgttccccatttcctatgtgtagtcatactagagctacttcctgaaaggcatttgaactgcaggattctagatgatccaagtggacaggccaggccctggaagatcagagaggccaggacctagggtgcagatctttggaccttggtccagtgctcctgggccatgccttctgcctggctgatctgtggtttcttgttgccatggactagggttcagtagacctcctgcaagtgagtcccagggtggcagggccttagggaaccctcctcctatgggatgagttggcaccctccatgcacagtgttctggtggggcagtaaaggagctctggggcatgcaggagggcaccccacctaggttgaggagagaggggaggctgcctagggagagctactcaggggaggaacaagggggctcagagtggtctaggcagggacaactgggacagaggctagaaggagagcaaatgcagcgtgctcaggggagtaaaagtaatttggtatgcttggggtgcagtggtttgggggagaggtgagggttgcagaagacaataacagagaaatgtgaaaaaagcctccctgccgttgagctgcagttgttccttccagttattagctcggctttcaattattagcttgaatctggtgtcctccaaaactccaacacacgcacacatgcatgcatgtatacacacgtgtgcatgcacacagcaaactgctccgtcttctctggcctagacaccccccagttccttccactgtggttattgtgctgttctccctatctctccttttggaagaggagaacttgaggcccaaagacatgaagaagtaggatggtgccatggaagacccaggaggcatggcgctgtggcctccatttcacagggacgttctgggtttgaatgcaataatgaacataaaaacaccttgaggacagggcaggataggcaggtgcttgtgcctgggacttctaggagctgtggaggtgagacctaggtcagcaccggccaaggcagctctcagctggagtcctggccatgtacctgtctctctggggacatcatctctgctcccaagaggccactaggactcctgctccagcagcagcctgggtggggcccagccccacagagccccagggcccggctgctcaccagctggcaccaggacctgctgaatatttcagggtggaaagtcccttctctgctgtcccctgccttgatcctgggttcccgcagccgggaacctgtctgccggaggtgtgacaggcagtcagggtggggtgggtgaggagaagcctgtgtggttgcacaggtggcgcttagagatgcagaattcatgaagttggtgtgagaatgacacggtgggaagcctgggcctggatgatttgaggggctgtctctgtatctccaaatgtgactagtgctaagccccccacctttgcttctagtggctatgatcctgtggggtcccaggacaactaatctagtaggtcatcacttggaaggtcttattagtcccgtgcaaagaactgtgcaggagcccgagcttgctgctcaagaagcttgtctctaagtgagcgtttggatcaaggcttgtgtaggtcattaagcacccttcccccagcatggcacttcagccccttctccagacactgctgtgaccacccacattgtatgagggggagaacagtggagggggaggagcagcaataggaaattggggtctgcgtgctgcctcatcctccgcccttcatcctggggacatgcttccctcttctccgcatcccttcccggcagcttacaatcccatgactttagcgactttgggcatctaactgtgagctctgaagaatcagactctatcttaagtacttgtcaccgcccacacacccctgccccagcagacaagttaaaatagtttctagatcccacatatcaaccagacaggtatttgtatgaaatacctgtcacatgaaccatatgaaatctgctgctatttgactgtttttaatctacatacaaggcaagttacatggctcaacgtagtaaagaatgccagatactagggacagggttgtgagtggtcagctgagtttaatgggtaaggaaaaccacactaggatgttagagtcttgcccttacccaggtcctgacttaggtgttgtgcccaggccagcccagcagggctagagctgcccttacaagagtctgaattgtttatccccatcatcttctccagcctcatctctttgccttccccgcttctagtggatgatcttagtgacagccagcatctgctctgagccctgcagactctgggctggctttcccgaatgccccttgcttccctccaggtctttgtcatgtgtctcctctgtgtgatgccttcttcctcttcgccttcccctccctactctactccttggggccagcctgttgctcatccctcaggactcagcttagacgtcacctccagaaagccttctctgatctgcttggaatatattcgcagtcattcatccatccatttatgaaacatattcagtgagtgcttgattgctccaggccctgtacttggtgctagaaatgcgtcagtgagcaagagagacacagtccctgccctcccggaacttcgaaaggaaatatttcctgggtcccatgctgcccttagcatcgtatctgccacactgtcttgtagttgaagctgtcatgtatctctaccagattctgagttcttagtggtccctggtcctaagcatctacttagtagactctcagtaaatgttgcttgcttgcttgattgaatgaatgaatggtagggtagccctagctgccctggaattgtgagtatctgaatgtgagaagcacttaggatgctgtggattggacagcattgctgcctttttatagccttgaatatagggtcgaaatggcatagaggcaaacagcacagggcaataactcaaatgcttcagtattcaaggagaggggcaggctggcatggttgaccaggaggaagcagtgggctatgtggtggttgtcccttcttatctccagctcccacccagatggaatctgaggggaagggagagatggtctgttagaaagagccttggattcccttcccagctgggcctctgacttgctgtgtggtcttgacatgtcacctgccctctctgttctgggtcttctgggacacaagtggtaatagacctaccttcctcatttagttctcagcttgtggttctcaaagtcctttccctctcttattccaagtgagccgtgggagggacatcctatgactgaagtggattggagactggtgctgctgtggattaggacaggttggtcagacaggtggaaggaaaaacagccatgaatcatggcaacaggctagcctgcagagggcccggacagaccctggaggacctgcccctggtggcatctttcaaagcttaatatttccacactggtcccaggaggtcctgacattggagacagcattgctagggatccagtgccagggaggtctcccttcactgtcttccccttcggcgtcctccatctcagagcttgggccgtcatgggtgtctccatccattcatttagcccagtcacagttacttccagcctgtatgccaagcctgtgctagagctggggctccacggttcttcttaggcagaatgatttgtcttattcacgacagtctccattctccatggactcaataactgagtgggaagctgaactaaaaggtctttaaggatcgttgcaaagaaataattttgagcctctgaaccttcttgtttcctttttttttttttgagacagagtcagtctcattctgtcgcccaggctggaatgcagtgatgcgatctgagctcactacaacctctgcctcccaggttcaagtgattctcctgacccagcctcctgagtagctgagattacaggtgcctgccaccatgcctggctaatttttgtatttttagctgaaacagggtttcattacattggccaggctggtctctgactccctacctcaagtggtctcccgtctagcctcccaaagtgctgggattacaggcatgagccactgtgcccaggcacctcttgtttctccatccatcctagtagctaatattgcctgctgtgcttttttgatatcgctggactggaggtgtccagaaagaaagagaaaaggatttagaagtgaaattcctggaggaccccagttgtttcgtgttcttgttcattttattcatgtggcaaatacttgagtatttggtcaatctctgtgcagtgggcagatggatctggtatctgctctcagaggtttctggatcaaactgcccaccggggtggagaaggcagcaggaatttctcaagctccggccgtgaggtctgaagtaaggccaaggggagcgctggcagtaaagcccccatcctgcgctcactgagctccttgcaaggcgccctgctctgggtattcggcatgtgttactctttaagtctctgcccaggggcgtgatcaggttgcaggggattcccaggtggcaggaagagagctgtgttcctttctggtcagaactttaaatagtaactccacgccgacgcatgcatacctcagaggagccagcctctgcagacagagaccagagagcatccagaggcctggccggggtcctgcagtgcagacgttgggaggcacggagacggggagagggggaggcggtccaggactcactctgctccacctctgactccttgaaggcaagatctgtgtggcccaccctccattccctcttttttggattctttcctgatttcccgcagctggatcagcctctgctgttttcccacattaccttatttttgtcttaatgtatttactacaagctttatagtaattgatgtgcttgtctgtctctgccactgggccaggagctcgtgaaagacaggaattgggtcccctttctccccaattcctcagccattagtgtagggcctagcacaaatgaagtgccttgtcactgtgctgtgtgctcggtgacaggctctggcatcctccactctgccagctctcagctgctctcccagaccccccacttttcagtgccatgtaactgacccacatctgacttctctgtgaaccagtcccattgtgcattcaggttcaggttcgatgtctaagatcccctggctctctgccgcttctctccttcccctcaaagaccaagccagcttgtcctcagatgccagttcacagcgcagtttactgggcccagaggggcagtgccttgtcttggcattgaaatgagagtgtctctgggccccctgtgcccaggaccccaccctcagtagctggcacctgcaaggttcctggagctggagagcagagcggggctggagagcagagggaaaaggtctgagttctgtgtgacctcccacaagtggctcttctttgggcttggcttctgtgatagaaataatcttaagagcgtctacaaatggctacactaatgacattcacagaggtgaaagtgtaaacataaaatgccataaaaatatgaggggctggctgggtgcactggttcatgcctgtaatcccagcactttgggaggccaatgtgggaggactgcttgaggccaggcattcaaaactagccagggcaatagagtgagaccccatctcttaaaatatatatatatatatatatatatatatttgactcttgctattcttgcagggatcattttcatctcctatactcagccaggcttttttaccctctcctggatgctttggaaggtggtgcagggctgcaggccttggccaagcccccctcccttggggaaatggcactgtcctttgggcgggttgcagcaggtggtatgggaaagtcatccacaccgctccccagggtgtatgtggccagcactggattttgcagggaaagcagctcagcctggaccagggtaggcatctgacctgaggttggggctgggagcttggtctcagtccggggttggcagctcaccctctacttttttctccacagggtgccaagtaccggggctccatccatgacttcccaggctttgaccccaaccaggatgccgaggctctgtacactgccatgaagggctttggtgggtgccaggcttcatgggagcttgaggggtatcccccaaaagtagacacagcccagagcccttctggtggtggtggtagggtctgtgaaatggtgaagtgcacttattcatttttttggtctcctctttttattaattttcatgatgttataataaaatgtttcagaaaaaaagtataaagaataatagaaatttcacccatagatttaccaccaaatttaagaactagtgcttcattagcatagttgaagtttccttggtagatccccctcctgataatgccgcccgctgcctttgcccagaggcagccacaatccgaaggtggtgcttatgttcttctttgtcttgtggtggaaagaaccctgtactgggtgttaggatacctgggttttctaagccaggttcattgtgagaccttggacaagttcttgcccctctctgggccttaatttcctgatttgtgcagtgaggagctggatcaggggccttctgagcacagatattgtgtgtgctgtgtccactttcagtcgtgacttaataaatccccatgaccctctgccctgacaccagcacctgatgagtggaaggctcatgctgaggcctgcagggagctactaggcctgtgtccagggaaggaagtggccctggtgggcttcctggaggcagggtgggtaggatgatgattgctctcccctattccaggcagtgacaaggaggccatactggacataatcacctcacggagcaacaggcagaggcaggaggtctgccagagctacaagtccctctacggcaaggtaaccacagcaaccggagggcccatggggtgcgggtggaagaatgatttcattcacctgtgtgctcgttcaggttatttcctggatatggcactccaggttagcctgtgggctgacaccttaccctgctctttttcttctcatcagctgggcgtctttcagcctttaatacacccacagcacctgctgtatgctgggctcgtgctaggtgttagggctgcactagtgaataagatgggtgaggtgtcaactctgtggactgccagatagtgagagagatacacagtaaacgaggaaacagacagtggtggggaagtggcacagggctgtggacctgaccctgcatagccgtttgctagcagcatgacatggagtaagacctctgttgtttctgagcctgtctcttagggttggtaacagtacatacctccaagggtgatgatttaatgagattacttagcccagcacctgccagagtaagtgctcattaagtgtaattcttaccgttgtaactactcttcctctttcctcttctatctcctcttcttccccacctgccaggacctcattgctgatttaaagtatgaattgacgggcaagtttgaacggttgattgtgggcctgatgaggccacctgcctattgtgatgccaaagaaattaaagatgccatctcggtaagaagtgggggtgtatgtggtgttggggtggggatgtggttaatgggaagattctgggctcttccaaaagcaactggtgagccccatacccacccagcacatgtgtcctgcttcaaagacacatctaaatttatcccagaggagcatcccgatccgcacacagagagatgcagacagatgtcaacatgatgcagacccccttaccaggagcttgtagtccaaggatacaggttatagggacatggagacaaattgtgtccaacactcctgaggccaagggcacactaaaggtaatcaacatgaccctgggccaagggttgtttgagagggcatcttaaaggataataggatcaagttaagccccaaagcccagagaggatttggtggatagcagtgtcaaggtcattgcagggtgtaaaaatggcaggagaagttgtggatctgtgtttagggtatgaagagtagttcagcccggttgaggtagaggtagagaattgccccctaggaaaaagagaggcaaagccctttaagtgtatctagcactttacagtctataaagtgctatgatctttgtcttctatgagctattaagcatgaattcattttataaactgatgcacttagcaatgtgagattattatcttctcaatctccctgtgagtttggcagagcaactaatatcatctacattttacagatgagaaaactgaggcccaaaaagatagtttctgaagagaattcacaaagctggaggaggcagaactagaacctttgtgttttagtccattctcacatcgctataaagaaacacctgagattgggtaatttataaagaaaagaggttgaattggctcatggttctgcaggctgaacaggaagcattgtggcttctgcttccggggaggcctcaagaagcttccagtcttggcagaaggcaaagagggagcaggcatctcacatggtgggagcaggagcaaggcgggaggtggggaagtgctacatacttttaaacaaccagatctcacaagaacttacgatcgtgagaacagtagcaaggagatggtgctaactattcatgagaaaccgcccccatgatccaaccacctcccaccaggccccacttccaacattcaggtctacgattcgacatgagatttggtggggaaacacatccaaatcatatgaccatgtcttatgagtctcaaggcaggagttcccaatcagtgcctaagagctgggtaggaacctcctgagtcctggggtgtcatagctctggccactccctgatcccaacctgtgtccagtgacctcccatccctgcccttaattcatgcgctctttttctacccccagggcattggcactgatgagaagtgcctcattgagatcttggcttcccggaccaatgagcagatgcaccagctggtggcagcatacaaagatggtgagatgggcaggaggggccgcttaggatcttcagatacaaaatgaggatgattgcaacagtggggacactaagattctagccatctaccttctctcctcctttcctctgatccatttgtccacccatttatctacccaataagtacttgctctgtgctgggtgatgtgctaggttctcgggataaaaccaaaggggtccctctctcttaggccaatgagataatgagataatgaaggagacacacaataaacaggtgaacagataaacacagtgatgatggattttagctaagtgttgtacaggaaataaggtaacaagaatcaaacttttaccagtgaggtcttgggaggaaatgaggaaccaatcgtataaagaatggagagaagatccttccaacagaggtcacggcaagtgcaaaggccctgaaatagaaatgagcctggtagccggtacaaggctagacaggtagaggacagggcaggatcacacagggcctgcaggccaagagagagatggtgttttattctgagtctaatgagaagttggggagtatgatgatcagatatgggttttaagacagccatccttgttgccgtgggttggaaaggaattgagaatagaggaggagagaaccatcggaaagctgtagccactgtccaggtgggccgtcatggtataggtgggctagagagaatgaacagattccatttcatcatatcatggtcagtacgaagagctgtgaaaatataccctgggtcttgccatgatggacgtgtagactgggttttggaattcttaaaaatatctgatcattttgggggcagcagggccctttatcctagatccctgaggtctctggggatgagactagagcttgcgttcctttctgcagcctacgagcgggacctggaggctgacatcatcggcgacacctctggccacttccagaagatgcttgtggtcctgctccaggttggttcacagcctatttttttcctctggagcttgggatagcttttgtctggctcatctgggtgtagatctgaatgtccagggtctggtcagcttcccctggtttgcacaggcaggtgtatttggctaatcctctttctctttggcacacagtcctctcgtgcccaggagtgtcttctgctgtgattttcttcctctctccacactcgctcctcccgctcctctctgggcctccttcctgccattgcttctgcagctgcacatgcagcatttctggaccccagcattcctgtggctactgtgtggagtctcccacatccgagccttattgcctcctcaccgcccgcccaaagtatatcacaaagagactattaggaggctacaaattggtgtctgtggctgaattcaacctgccaagttggattttttgtttgttttcccataaaatgtgttttaagaaagaaagcaaaacaagtttgagttagttgctaacatttaaaaattgtgagattttgctcaaaaaccagatttctggattattttaatgtattgaaagttgcggtagcagcagacctgcattctgcacgactgcagtgggctggagagcatatgcgtcctgcccgtttcaccgtgaatgttatctacctggctctgtaggtatctctgtgaccacaggcacgatgggaacaggcattgagatgtctcaagctcagctccaaggaccaaatggttatgaaactttatatataaattaagccaccactatgtttcctcgttcccccatttcccttttataccagctcctcccaactctgttcctctcattgccataacaatcccatattaaccagctggggaatgatcaggagaaacctcaggagtgggacagtgtgacctgtgccccattttcaaagctgcttgttctggagaggagtgtcctatccctgtatcttggagtcaagcgttttgtatcctcaaggtttgacaccaagcagcagcgcggcacacattgtaagcttgccagctctgtcttctgctcagtcccaaagagaaccctgggggtttgagatcctggaatgcacaatccagggggaagaggggatggccatagacctctccaggccacctgcagacctctgcccacgtaagaaggagttgagtactgctcgcccctcttccctttgtgcatcctcctatgtgtaagcttcctctatcagatgaggcaaagggcatgggcagaacaacagaagcaccattaggatttggtgactttgtagcttgtgagctcagatcttgggacctgagtcccaaatccttattggtgaattctttaagttaaggtataagagctcctaatagaatgcaaatgttcagatcctttgcccctgtggaatcgttgctggaggagtgtcatgggccatgcaggatctgtggcagggaccctcgagaacctggggccctgtcctcagagaggtcctcagggcaaggctctgcctacctctgggctggggacacctggaagaaccttggttgttcttgggactctcctgtgtggacccagccctgacgaggaagggaaaggccagagggagggtcccttttgattggctcacaaaatagatactgtggtcttcatgcaatagcagtcactgcttctggacacatctgggccaccagggttttcctgctttccctgtctccaccactggcatccaggcctccctcctgactttgcagtgtttgaaacacatgttctttgtctttctgcccagggaaccagggaggaggatgacgtagtgagcgaggacctggtacaacaggatgtccaggtaaacaagcaccactgaaagtccctgaggcacagcagaagagccttgggaggggagaggttggggccctgggaagggctggaggtgaagtcatttgcatcaaataccagaaataacccagccacagctgtcatgtataccggtgctttgttgaagaaaagatataagttatctttcaaaggtatatcccatatgtaatattggtatattggtgaggtgtactttggagctttctttattcattcagtttttagatattattgaagtaaaatacctagcatgtgctaggcactctgccaagcatttagaaatcactaatgaacaaaatcaagtggtaccgggagagacaggcatacattaatcacacaaacaccttctctatcaatatactgtacattgcaggtgttttgagtacccagtacatgccagcagcactacaggggctgatacagagaatgctatgacatagtccctgttgttgaggagctcatgcaatagtgtggagatagacaggtgaagaaatcattatcatatacagtagatcaaagtgataaagaagtagaaagctatgggagcctaggagagggaggaaaggagggaaatagaactgtgcctgggggcatcgggaagtactttgagaaaaaaatggaatacttaatctgggccttgaaggttgagtaggagtttctccagaaagaaaggaagaaaggcatataggtatagtcatgtaccacataatggtgttttggttaatgatggaccacatatatgatgctagtcccataagattatggaccagatatgtgatgctagtcctataagattataaccccatattttcactgtgccttttctatgattatttatgtttggatacacaaattcttgccattgtgttgcagttgcctacagtattcggtaagataacacgctgaacaggtaggtgtgccgcctaggagcaataggctataccacggagtctgggtgtgtagtaggctatgccatctaggtgtgtgcgagtgctctatgatcacacaatggcaaagtcgcctaacaatggcagttctcagaatgtatccccatcattaaatgatgcatgactgttttatttgcaaaggtcttcaggctaccaattactcgtgtgttcagggatcaggcagcagttctgagtggcttggtcagtgtgtcctgtctcctgaggtttcctctttcagtcaagtgccacctcttccccttcaggacctatacgaggcaggggaactgaaatggggaacagatgaagcccagttcatttacatcttgggaaatcgcagcaagcagcatcttcggttgggtaagctccagagaagacctgaagctgctcccttgggttgatgccaataatgcctttctttatctcttttcttttctttaccactaatggaacatgatacctacttcattcccaacccaaactttagtcctgagtttattaggttggtgcaaaagtaactgcggtttttgccgtttttaaaggaatggcaaaaaccgcaattacttttgcaccaacctaatatcagacagcagtttgtatagtccctcagcaaagtcattaacaggatgcttggccttccatctcagtgccagtcctgtctccatgttaggggatgagacacagtctctcaccagctatgaagctcatctgcacagcgctggtgatgtgcgtgacctcccagtcgcctccatcatagcaccagccctagcttcatggtggacagtcgtcctggccactgtgcccccctgctcttgaagtcctcatttcttctcgggggtacagaggcactctcaaacctccctgtctctctgtctgacgcagtgttcgatgagtatctgaagaccacagggaagccgattgaagccagcatccgaggggagctgtctggggactttgagaagctaatgctggccgtaggtatgtcctgacgttgcattcctgggggctttaggggattctggaacactggcctaggaacaaggggctgagaatggaaaggggaattacatggtatagaattgggaaggagaaaaccatgtgggccgtgaattctaaaggtttctccagggcagcatggctgaggctggggacgggaagggggtttgagcctcaggtactgacttcctccagctcccttctccaccactggcagggggacaaagagctctgaacttgggttgaggataatgatgatcataatagttgacttttgttgagcatctagtgcatgccaggcactgtgctgagtgtgtaatctttaaaaaagacccagcagtggccactgccatgatctctatttcacagatgaggaaactgagtctcaccaggctgatcatttcctgaggggtagttttgtaatgagttgggggtactgagaacgtgaggatgtgaggaactggctagtcagtggtggagccaagattcaaaccagggcttctcccacatgggcttggagcaagtcacttctgcttgctggacctcagtttcctcatctgttaagtggggtgcagggtgtgggggcaggaaggatggactgccttaattgcctccccagaagcccttccaattctggcattccagcagttagcatgtctgagtcagggatatgttgtgtgtttgtatttcttgggggaaacctgcagctcctttatcgtccctcccagagccatcccctgccctccctgtttgaagtagtcagccagtgggactcacggtgattcagtgggattcacaatgattcagctgccagtacctttctggtgtagcaggtctaaaaaacaccttttcctccttcgccccagaccctacccccaccccagctcaattccctgttaaaaccaaaaggactagaaagataaaggcggtctttgtgatggacttcaaaaggattatttcaacaagattatttcctgtttattccctgggtgtgcggtaaaagtgggttggtctggggtgatctggggctgtgagctatcaggaacggtggttcttcctgtattgagctaggtggccctcaaggaatagaaacaaagagggagtcaggccatcccatcccccttctgaggcagccagaataactctacctcttcctccctcttcacagtgaagtgtatccggagcaccccggaatattttgctgaaaggctcttcaaggctatgaaggtgcgtggtggggctgatgtgaatggggtttggggagaggactattgggagtctttgacaagtccttgggatccagtggccaaagagagcccttcagggatggccacaggactgaccctggtgaaggtgctctgtcgcaggtgagctgtagagccaggaatgctgctggtcacatgtcctgccacctgcatacctgcctgacgtcatgagtcaacagatgaacttagggtggcagcctgcacctgatccctccagccaaatgggttggcggctcggactttgaagaagtattaaccagaatgtttttatacagcgtatgtaggcaagaccactttggccttgcctgctaagactcatgatgctcaccctgtgacagttccactctgggtgtgtttctgagaaagcttcccaggcttttacacatatgacgcacaaagaaactggtatttttgtgatgcactggaggaaatgaatgcagttatttgctgccagaggcctgaggcccgagacacaggagcttgggcctttctggccctggttggccattccgaaaggacaaagtagactgtcggccattctctgcccaccagtgtgccataatgaggttgggcagctcagccctagagagatgtttgcctgtatgcatgaattcattaagaatgcccatcacaaggctgagtgcatgcagtggctcacacctatgatcccagcactctgggaggccaaagtgggaggatcacttgaggcccaaagttcaagaccagcctgggcaacatagtaagacccttgtctctacaaaaataacaaatagaactagccagggactgtggcacatacctgtagtcctaactactcgggaggctgaggcaggaggatttcttgagcacagggcccctgggtttgaggcttcagtgaacgcagtgctatgtgatcacgccactgtactctagcctggacaacagagtgagaccctgcctcttcaaaaaaaaaagaaaaagaaaaaaaaaacttataacagtattgcttatattaggaaaaagctagaaacaacccagtgaccatcaggaatagtacagcaaaaacctaaatgcacagtggtatatttgcagagttccaaaatgtgtaaatctaagtgtattgcttagagttacaaagctatggtaaaattataaggaaaatcaagtgtggaaattatacatgaagagagaagaggtttataacagtgagagggccgggcatggtggctcatgtgtgtaatcgtagcattttgggaggccaaggcagcccttgaggccagttcaagaccagcctggccaacatggcaaaaccccatctctactaaaaatacaaaaattagccaggcgtagtggtgggtacctgtactcccagctgctcaggaagctgaggcaggagaattgcttgagtctggaaggcagaggttgtagtgagctgagatcgtaccactgcactccagcctggacaagagtgagacactgtctcagaaacaaacaaacaaacaaacaaacaaacaaaacagtaagaggagcatagagagagcttcaatgggaatggcaatgtctgcttcttttgctctaaattttaactttttattatgaaaataggattttcaactaagctgggagctatcagcactctagcctcctctcaagtccatgttccccaaacccacttgtcttgcagggcctggggactcgggacaacaccctgatccgcatcatggtctcccgtagtgagttggacatgctcgacattcgggagatcttccggaccaagtatgagaagtccctctacagcatgatcaaggtcagcagagctcatgggggcagagaagggagcaaagagctttttgccaagacagagggcttggggactattcccaggaaaaggaaatgtcctaggaagtgggagtctcttggacattccaggagctcctgccttgtggctcattcaaggaatttaaggatattcaacagaaaagcaagtgttaggggtgtttgtgagtggtaaggctacagaaggaggcaggggctgggtcatgaaggacacgcaagctgaattaagtgcgaggactctgccccaagggcagtgatagttcagtctcctggaagaaggctgggaaacactgaagaacacaaatgagggttaaaggggaacctttggcctgggccgggtgattggtgatgactctgggacatccggcccctgaggctttatcaggagacatatgtaaagctaggggttttccctttttttttttttttttggatgactgaaataaaactttatggggtgacagagaaagagatccaagttgtattctccaaagtatgtttccaaagggtaatttttttaggtgttatgtgcaaaatgttctatgggaaaataagtttgtaacaaaccacaataagcaaagataaataagccagtttctttacctcagaacttctcacagcctttcacattttgaagtccattatgaagccccaagagggatatggaatatgcatctatacggatatgtgcatctgtgtaatatatatttgtttgatttttttgcatttcccaatatttttgctcatggaaccccatttccatgcatatttcatgtggaaggactgggctggggactgtctggtggcagtgctgtgctggggcactggcttgaaagggcagcgagcatctcttctcaactccgcatattggtagcaaagtcatattggtaacttgaaattgtccattgctagaagtatttacaccacagaaataggcaaatgctataaattagggcttcctccaacctgcccgctgagaaccagttattcaatattaaccagcacaggagggccagggctgctatgaataagtgttcattcagccttcccctctttcaggctgtgcagaaccttcacctccttgtctgagaggagcccagggctgggtgagaggtaacctttctttctttctcttcagaatgacacctctggcgagtacaagaagactctgctgaagctgtctgggggagatgatgagtaagtggcttcttggcccctggctggagggcatggccttggggtgccaggcggggactctcctggctcgcatcctgatgggtggattggatgagctggggattcccctgagccaggagcgtcgcacaagtgaaaggcggcttttgctggtagctgctgtgcttgtgggtctgtgtgtctgagagtgtgggggtctgaacgtgagcgtggtctcctgtatatggagatgtctgctcttgtgaacttggaaagtcagtctggggttgtggactaggaaccagaatatgagcatccaatccctgctatttcatagccatttctcggtttcatcacctgttaaatgggaaaaggacacattcctgctctgcctactcatttatgcagcatatttgtgttaagtgccttctgggtgcagaccctgtgaggaagcccctgatgaaggccacagcgcagaagggtatagaccagtttccagaagggagcagtcctgtgctggggagaactggctgtgccacatagaaagcatatataaaagcacacagagatgccctagcccagaccaaggggagactctttggagatacacggtgagacccaaggaggaaggggaagagccaggtgaagagggtctggggacagtgtttgggtggaggaaatcacctatagaaaagccgaggagtgagaaggagtggcctgattcattcatatgtccgaagtcatgcatttatggagtactagagagagaaataaggcagagaagtgggagggcctgggggcctcttcccagaatgttaaattgggacattacttgaccagatttgtgtttgagaaagggaacaggctgcgctctgatttcctttctctggatcttataaagatccaattacagaagggatgcaagaatttcctgtgaacctttggtaaggaccataggggttgatgcagttcagcagatattactgagctcctgatgcatccaggcactttgcaggaggagatgcagggctggcatggccatagcttgctcaatggcctctttgagaggggagagttggatagaagccattcaaattctaaggaagaaaggggaggctgaaggattggaaaaatcctatcctgcttggactctgcagccaggaaggctgcccttaaaagccagcattggccggacacagtggctcagcgcctgtaatcccagcactttgggaggctgaggcgggcggatcacctgaggtcaggagttcaagaccagcctggccaacatggcgaaaccccatctctactaaaaatacaagaattagccaggcgtgatggcgggtgcctgtaatcctagctacttgggagactgaggcaggagaatcgcttgaacctgggaggcagaggttgcagtgagctgagatcgagccactgcaccccagcctgggtgacaagagcaaaactccgtctcaaataaaaataaaaaataaaaaaggcagcattgcagggggtctcaagagatggaaggttctcagaaatggagggaggactctggcgaatggaggaggcataggctggagagaaagaaagcttaatgtgtgtgtggtgtgtgcacgtgtgtgtatgtgttggggtgtgtgtgtgtgtgtgtgtgtgtgtgttggtgtgagtgttgcccatgatgacattccttcctgtcctctccctaaacccctccattccagtgctgctggccagttcttcccggaggcagcgcaggtggcctatcagatgtgggaacttagtgcagtggcccgagtagaggtcagaccttcccctcctcctgcttgacctcttgaccacagcttctctgcttgcaccttcctgctgctctggttggcacccagctgccccctggcggccaacccgacacgttgattctcacatctgaagcttccttttctcccttggagtggtgaactggtggaggggcgcacctggtttctgcattagcttctgacacgctggaaagggttctggcccacttactaacagggcttgctgaaatggagacctggctggttccatggaggggcctgtcccgtctggagtcgaaacagttggcctcagagacatgaaagctgagaacagatgggcatccctgggtgcactggaggatttcaggttgtcctcctgagcatcctcagactgggggtccacaaaggacaggaatgaaaggtttcactaaagtactttaggcaaaccattccagagactgcaacacttggtccacacaaaaaagcatgggaccttggagctctctgttacttattcgctatgtaacctttggaaggtgccccctccctctgggcctctatgtctccatctttaaagtgaggggttaacatggcaatctcggtgatctcttagggctcttgagctctgatgttctaggacagtgttccccaaatgataaggcaagagatctttgcagatgattgtaggtgatgtgagaagtgaatttagtttggcagggttgaataacgctgaactccacagagtgaatgagaaaggcactcctttccaatttcatcagcgtttctgattacgtcaaagaggaagtcttggtttggtgccgccgtctctgcaacacttgctgattttcctttttcacaaagagaaagctgagagagctcgctttaagtttcagagcttctggcaagtagaggcatcatgttaaatttcatggtatatcacctcttttgtttttattatgttgatttttgtggtaaattgtcagtttatgatacatggtatcaacttcctaattcatggtagttatataaaattaatttcatccattcctttttttttttttttttttgagacagggtctcactctgttatccaggctggagtacagtggcatgatcatggctcactgccacctccccaggctcaggtgatccttccacttagcttcccaagtagctgggacctcaggtggacaccaccacacctggctaatttgtgtagagacagggtttcaccatgttgcctgggctcatcttgaaccaatgggctcaagcgatcctcctgccttggcctcccaaagtgctgagattacaggcatgagccattgtgccaagcctcattaatccacttaacaattattttttgagtgtgcctattatgtcagacactgttgtaggcacctgggatatgtaacaggataaaacggatacaattccttgccttttgggagtaattttaaatgcacttcaaaaattgatgcatttaagtagacagaaaagaagttgaattacataaaaccattaagagatggcatagtgtgtgtgctaatttggaatagtgaaagtcctttaggagtgactgaaatttgggaaactctgttctggtatttcagaacttttctgctgccttttcagggggaatgactctttaagaggcagagggggcctcgggggcagggtaggattcagaagaattggggatgccccggtggaataagcagccaaggggcactagaaccgaggcagatcccgtggcaggcgggagcctagccaatttctcttgatcaggacttgccctgctcccagccctgagtccctctctccctctctctatatctttctgtctctttctctctctctctctctctctctctcagctctcgtgcagggtctgtctgctgtggcttcacctctgcctctttccccacccacgccgcttggtttgggctcatggggtgagcttcccaccctcgcatgctgtctttcagcctggtccccaggggggccttcagacacctgctgagtctctttctgcttctcacagctgaagggaactgtgcgcccagccaatgacttcaaccctgacgcagatgccaaagcgctgcggaaagccatgaagggactcggtatgggggatgggaagggagcagggttggtctccagggcagcaggtgtggtgggtttggccgtgggctggcaggggatggagtgaggtttcaaattagagtctgcaggatgaggaaggcttgatctcaagtttccaccctcctagctcccagagtatagagaggaggggcaggagagggttcataaggaacttggcagaagccctttccagggaccaaggtgtcccccagcctcctggaagcagtatcctggcactgaagaaagtaccaggtcacaaaattggcatggtgccctggctctgctgctgactcaccgtgtgactctgggtgagcctctccgccactctgggtctgaatttccctatgtgtaaaatcagggctgtggaccctggaacccaagagccctccctcattctgtggtgggagtgtgccctgctgggcaggtctttcagacctatatttggcaccagtgggaagagtactgcacccacaggttcagatcagctgggcctgtgctcagaaagtccagcctgggacaggccatctagggtttggctttctttgcctttctgccccatctgtctgacagcaactcccaggaggctttaggttaagtccatcaccctcctgagcctcctttccatgtgtctcatgggaatgatgatacctgccaagctcgcctgggactgtaggatgctagaggtaaaaatgccatgaaagacccctgtgctgggtctgtggttgatggcattaatctgagaagcaggaagtgatattctaatgccttccagagtcaacctgctgtggttagagggactcagggtccagcttccagagagctgaagagaaaggacatagagttgctaacaggacttggactgtcagggttggaaggatcccttggtgactactccagcctcttcatgttacagatgtggaaaccaagtcccatcaagggaaggggacttgcccagggtgggcagccattgccagagccagaactagaactcagaggcactgactcccaacccagtgctctctacctcccagctgtcctttttcctcagcgtgtcaaaaggaaagggagggaggagtccagcagaaatcagtggcctgagccataggcaagcggactgcagggactcaggagcacatggccgcttagccaggcttctaccctgacaaagatcgatgaggggccatcagtgggcggtgcatggggaaagccgagagccacaggccttcttctgaggcatgtggctttggtgactcagggactgacgaagacacaatcatcgatatcatcacgcaccgcagcaatgtccagcggcagcagatccggcagaccttcaagtctcactttggccgggtaaggacctcctcctgggctctctgtgcaacatgcatgcaccttgcctgattgagctcagcctgtccccatcggttctgcacagttgggcaccagggtcttcatggcagagggaccctgtgtggtcatatgatctcagagtgtctccagcactgggtttgggcagacatatctttccatgcccccagttccttgtgatgggcaacacttgtgtgagttgctcagtggactcagaggcacagcatggggccaagatcagggctatgagttgttttcagtgtgctttgggcatcttgcaattcctctgcacagacagagctggcttcaaggccccaactgagtgtcagggattattgcacattggtggcatctggcttaggttgatgcatttccccctgagtggaaacagtgtccttcagctctgctgccttcccgttcctgtctcctgtgtcaaggagagtgggtcttcctcctggttgttttttccctaccctctttggcttcatctaaataataagtacaacatcagcaaagacagacacaagcttccatgatccctcatgtggaacccctgttttctctttccatctctcccatcctgagtcatgtgtgggcaagtgctgatgttggcatgactgtggctctgccctttgcaggacttaatgactgacctgaagtctgagatctctggagacctggcaaggctgattctggggctcatgatgccaccggcccattacgatgccaagcagttgaagaaggccatggaggtacagtgtggcaccagggggtctagtgtctgcgggtgccaatagggatacaggtgatcctcataagcccaggtggattagctgtaacttcttggtagaactcctcccatactcagttcaaactggcataaacacaaaaggagatgttggctcctataactgaaaactacaggactagctctgagtccagagactcaaatgatgttctgtggacccttggctcacccctgtcttggctctgctgtcctcccttctggcttcactctcaggcagcctttctcctcatggtggcatatgtccatcccgccagctagcggctccagcagaaagagttccttcttcctaggagctccaacaacaggcttggcatttactccaagttgattcagcttaagtcacatgcccactggtgtcagaagggtctcatggagccgctggaggaagtggggtgggtctcgaacgaaagcaccagcagttggagtctgtactccagcctagacctgccactcactcacagtgtgactgggccattccttacacttcccaatcctctgtgccttcatctgggaaatggaaatggtcacctctgcccttcaaactaggacaggtcaatcaaggtcacaggtatgaagggcattgttaactccgaagacctgaccctacattaaacaagaaagcattatgtcctggcccagaagttgctagaactgctttgcttcccaaggtaccaattgtactaatggctactgtttataaagagcatatggtaactctcccaggttaggtacattagttcaattagttgcctcctcaagccacaaggcagggctcttattttgtccccattttacagatgaggaaactgagacttggaggttaagttgcttggtcatggtcatagagctatgaagtagcaaagctgaggttcagaccagtctttctgactctagagcctgtcttgacaaccgcataaaaccagtagtgcttttggccccttgcgcattaagaggagggcagcaatggggagctagaggactttataaaaacattgcctaggctaagcagattgagatgattgtttcttaaaatacctaagccaaaaagcaaacgatctaaagacacagggttcagaaatagaagagatcgatgaggtaacccaactgaatcctttccattttcaaagtttccaagtgggaaacagagaggctcagagagtcagtgagttagggggagacgagggctagacccagtctcaggactttcttgattgcctcaccacacacctgcttctaacaaagaaatgattgaagatctcaatcaggatgaatctcctaggatctgagaaggcaggaccattagagcactaggcagtaacctctttgaggacagagaacatgtcttgcctcttgcctttctctttttttttttgagacggagtctcgctctttcgcccaggctggagtgcagtggtgtgatctcggttcactgcaacctccacctcccaggttcaagcgattctcctgcctcagcctcctgagtagctgggattacaggcgcacgccaccacgaccagctaatttttttgtctttctagtagagaaggggtttcaccatgtttgccagcgtggtcttgaactcctgacctcaagtgatctgccctcttcagcttcctaaagtgctgggattacaggtgtgagccaccacgcccggacttttttttttttttttttgtagttgtagccccagcaccttgcacagtggctagcacataataggtgtcttaacaagtacctgaatgagtgaattagtcattgactcattcagtcaatcaatcagtcaatcttgcctgcctcctctcctccctgatagtttccctgcttccctgtgtgcagatctttgcatgacaggtccccagcctgccttagtccagggcatgtaacgcctcagttcataaatcactcctcaaatccaagagtaaacaaatgtaagccagccatgatggctcacgtctgtattcctaaaactttgggcttgagtccaggagttccagaccagcctggacaatatggtgaagccctgtctctacaaaaaatacaaaaattagccaagcatggtggcatgcttctgtggccccagctacttgggaggctgaagtaggagaatcacctgagtctgggaggcggaggttgcagtgagccgtaatcatgccactgcactccagcctgggcgacagagcaagactctgtctcaaaagaaaaaaaatttagcattttatcttaagcacaaaactttttttcttctaacaaaataatacatgttcactgtggagacttgaagaaatagagtaaaaaagaagaaaatagcaatcatctgtgatccttcactcacacagagaccaaactgctagttaacactgtgaggcatgtgcgtgtccttctgttctcttccaatacttacaagtagaaatttctattcagatgttcatgtgtatatgtggtgttatacacacacgcctatataccttttctgtttggggggctggaaggcaaagcagttcacatgggaggttctggggatcttgagaggctggcatagtcagccttggttgtgccaaggtcttgggcctgagggccatgtctggaggtgaggagaaaatccaggaatgcttggcctgagctttagccgtccgggccccatggacctctgcacaggaggtcagaactatggctgagatcatctttgccttgacattccagggagccggcacagatgaaaaggctcttattgaaatcctggccactcggaccaatgctgaaatccgggccatcaatgaggcctataaggagggtgagtttgggaggcctgggcccagatgctgggagaacagccaggccccccaacttccaaccccagcccacagctctgcccaggactctggcctgtctcctttccctcagtccttgaggatttgataagcctcttgggtgtgcccatccctgtgtctggggaaaagacaggtgtcctggtaggacaaaggcctggaggtagaaaagggcttggctggaagtgggaacagagaacattctggcctgctggagagagggagggcgactctaggggtgtgtagtccatgcagttctacagggccccacagccagaagggccccacacttggttgcaagctatgctgtcactgtccagaaattcttcatttttaagcgagtggccccatattttcattctgaagaatcttgagtaccagtcaaaaatgtttaaatcggctaggtgcagtggctcacacctgtaatcccagcactttgggagtctcaggcaggcggattgcttgagcccaggacttcgagaccagcctgggcgacatggcaaaaccccgtctctacaaaaaatataaaaattggctgggtgcggtggttcacccctgtaatcccagcactttgggaggccgagatggtggatcccttgaggtcagaagttcaagaccaacttggctaacatggtgagaccccgtctctactaaaaatgcaaaaattagccaggcgtggtggcatgcgcctgtagccccagctacttaggaggctgaggcaggaggatcacttgaacctgggaagcagaggttgcagtgagccgatatcacgccactgcactccaacctgggagacagaatgagactccatctcaaaaaaaacaaaaaacaaaaaaattagctaagtgtggtggcatgtgcctatagtcccagctactcaggagactgaggtgggaggatcacctgagcccagggaggtcgaggctgtagtgagccttgatcatgccaactgcactccagcctgggtgacagagtgagaccctgtcttgaaaaaaaaaaaaaaagtttacattttttatcttataagcagctttaaaatggcagaatttttgagtacaggagtgacatagtcagagctctgcttttgggtttagcaactgccatgcaggagggaaggtagaagagagaatgacaacagggaggtgacttaagaggctgttaaatattaaaggcgagatgcaatgggacctcaactgggacagagctgaggggatggaggggagatgatgggttgatgggaatgcccattgtcttacaaaatcagcaggaggatggctggatgcccccatgagccagttacaaaccctttcatccccacctccccctgccaatactgccctggctcaagcctgagtttcctggacctccctccccgcaaccaaatccttcttggccagcagctacccacaccccctttctctgcctcagactatcacaagtccctggaggatgctctgagctcagacacatctggccacttcaggaggatcctcatttctctggccacggtgagtgaattcatgggccccaggtcggcttgcccatcgggaggcctgggaggaagggaaggtttactgagtggagggcacaggggagttagaagtgcactcctgatggagagggggtgtctccccacttgcctccttagagttccaccgcctacccctgttgttcccttgtcaaagttggcgtggtaccaccttctccagacagtcctccctggtggcccttgtcctggcttgttgggcccccagctcacaggacaaagccatatgggtgaccctctcctgtgttgttacctgggagcttctgtcaccatctcttgaattcccataaccaaaatggcagaccctcattgacagttaccgagagcttgctgtgtgtcaggcattggtgctaagtgtcttgcacacattctcagttaatgaccacaacagcctaccttatagaggcaggattttcgtccctgtgtagctgatgaggaagagcattcagagaggtgaaaatgagcagggtgtgtggtggtacagagatggagatgggtcgatgtttggggactgaactttcttgctgctcctgctgcaggggcatcgtgaggagggaggagaaaacctggaccaggcacgggaagatgcccaggtaagacccccagcccaccccagtcacctctgccgggtgtccctgagatgtaggtccagcttatgcgtgtctacgccgggccctgtctgtgagtgaaggctcctggcaggggcgtggttggtttgattggttgatacttagactgtagaaatgaggtttagaagtgtggtgctggtattactggcatttcctaggtgaatagcaggaccctcagagctggcagggacctgcagatcacccaggtcaaagccctcatgttacagtgggaaaatggaggtccagaaagggcaaatgacttctgaaagtcacacagcaaatcagtggccccagtagaattgacccctagagagctggtctgggaacttgctgagaagagggcctgagtgctaaaggcctcggtttattatctgtaaaatgggaccgagattggagggagtgtcctgggacgagcctagaaagtaagttcctcaagggctggaatcttcattttgttcactgatatatccaaagtaacacatgatcagtgctcaataaatatttgttgaatgaatagcagggaaaagggttctctaggagtctcttggctgctctgcctcagccctgctccttagcctagtgagcttgaggtctggaaatggcttcttctggaggttggacaaccccaaattcattttccctgagggttctatggctgggcagtccctactgaggccagtgcattgtcccccactgacctgcaccttgatcccagcacccagtagcctgacccaggtccatgtctccatctcttctgactgcctcattttcccgcccccaaaagctgtgtccagggatgtggggcacagacaccacagacttttatagacatccagcccccttcttttatagttggtgagttgaaaagagcactgatggattgagagtcagggaaccaacttttctgttcccaggtcccataacagaagtgtggtttgctacaacagcatctgagctagaaaaatctttagctggaacctgacagttacagaattgtaattataatttttagaatgcatactatatattgagaacgatgccaagattattctatacgtttttatgttctccctttttactagaagaaaatgaagctccttaacctcttcaatgaaagaatttctaagtggtggtggttttatttgaactcaggcttgcctgatgccagagtctatgcttaattccatttacagtaatatcttccaagacccagtagagttaaggtcccctgcagcttccacatcaaatagctgttgttgtccagttgtccaacccttgctttggaatatggttgtcaaaagctgcagggttacatttaaatgtatggcatttcagctacattgtgggcacatggatgggggttaggctgagaacccagccagacactagggtggcttgctgaggccacatttcattcactcattcaacagacgtttattaagtattactgtgaacagcctcgtgtgctgctgagagttttttaaaaatctcagctctcaccccaaatccatcctccaaccctgaattgatcttccagggaatgcttctgcctggtgcctggtttgccaatgaggctgtgcttccaattgccgctagcagggggcagtggtgggccttgctgacagctgcttcgcaaaaggagagaagtggagagagagaacccgggtggaaatagctaagggacccttgagcgagatccctgcccaactcggctgcttctccagatttaggatgctagacccaagctcattttcttataactagcagtacattcttttatagaaactagaaaataaggagaagccaaaaaagactccataacctaatagtaataagcattgtcagtattgtggcatacattattctagttgcttctctatgtatatataaaagtggattctttatttctgacagttaaaaattaatactatgtgaatattgttgcatttttaaatcaacgatatcatttaatggctatatactgttccatatctgaatctaccatgttatttaaccagccttcttcctagtagcaaactcttttatcacattcatgaattattcattagaatgaatttccagagatgaaatggaaatgtgggagcaaaatgtatataaaaattaagggcatttgatagggccgagtcaagctcccccttagataacgcacatgagtacttggcagtttgtatttgcctgttttacactgcctccctggcggtctctcactctggatgtctagaacaccctcaagctcttagaagtctgggactgttattaaccagttgaacatatgtccaatttccaactgtggccccacagtgattgttaattgcttcccctttcactctgttgtccaattagagcaataaattataaataattattatagacctaccatgaaatgaaggattgtggtcatttttagataatcaatactcagacttttttttttttttttttttttttttttttttaagacggagtctcgctctgttgcccaggctggagtgcggtggcgcaatcttggctcactgcaacgtctgcctcctgggttcaagcaattctcctgcctcagactcccaagtagctgggattacaagctcccaacaccatgcccagctaatttttttgtatttttagtagagacaggatttcatcatgttggccaggctggttatgaactcctgacctcaagtgatccgcccgcctcagcctcccaaagtgctaggattacaggcgtgagccaccatgcctggcccaggcttttaaaaatataacagctttcttgaaatagaattcatttaccccactattgacccatttaaagtgtacaatttggtggtttttagtatcttcacagacttaatgcaaccatcaccacaatcaattttagaacattttttcacccccaaaagaaactccatacacattagctgtgactcctcatatcctactaaccccccagccctaagcaaccactaatctactttctgtctctccagatgtgcctcttccaaacacctcatgtcaatacagtgatattaatacgtggccttttggactggcttcttcacttaagaaaacactaacctaaacactatgttaaacacttaacagtgttttcacgggtcatccgtgttgtagcatgttggtactcccttttcattgccaaataatagtctattatccattcatcagctgatggacatttgggttatttccaccttttggctattatgactaatgctgctctaaacatttgtgtacaagtttttgtgtgcacatatgttttcatttctcttagatagaattgctgggtcatatgagaactctaagtttaaccatttgaggaactgtccagattaatttttgcatgaagtagctaggctaataagaacaagcttttgtggtgaatattaatttagtgtcccaccactttttttttacattacagatattattatcttaaagatgctttgaaaaaccgagtatgtctagggtactctgacccgcgtaagtgagaacaattgggactttggattcttttctgttaaattttttaaacatgtccctctctctctctttttaaaaatgataccgttttatttagcataagtttttacaaatttttgataaaatacatatcaactttaccatattaatcattttatatatttatttattttgagatggagttttcctcttgttgcccaggctggagtgcagtgttgcaatttggctcactacaacctccacctcccggattcaagtgattctcctgcctcaccctcctgagtagctgggattacaggcacctgccaccacacccggctaattttttgtatttttagtagagacagggtttcaccatgttggccagactggtctcaaactcctgacctcaggtgatcaacctgcctcagcctcccaaagtgctgagattacaggcgtgagccatcatgcctggccaatcattttaaagtatacagttcagtggcattaagtacattcacattgttgggcagctgtcaccaccagccacctccaaaactgttttcgtcatgcaaaaccaaaactctggacccactcaacagtcactccccattctcccttcccccagcccctggcaaccaccattctttctatgtctgtgaatttgactggggacttcatgtaagtgaaattatacagtatttatgcttttatgactggctttctttacctagtatgatgtcctcagggttcaactaggtttttgttttgtgatgtttgagatagggttgagacccaggttggagtgcagtggcacaatcttggctcactgcaacctccaccttctaggcccaagcaatcctcccacctcagccccccaagtagctgggaataacggcgtgcgccaccatgctcagctaattttttggtagagtagggtttctccacgttatcccggctggtctcaaactcataggctcaagtgatcctcccaccttggcttcccaatgtcctgggattacaggtgtgagctactgtgcctggcataggttgtttttaatacagaaaaatattttaaaaaccagaagcagcccataatcctagtagccttgataactcttatttaacatttaaatttaaaatgaaataatatctttgcatctttaagaaattttcaggaagaataaaaaaaatgcgaaagctttccctcatagtccctctcctcaaaggtgtctcgacagtttcttaagtacttcccaggaagtatgagaaagtgagtgtctatttttttttgaatctagataaaagaaacactatattacacaaaaatatgctatactttacttctttacttaatttaaatggaaactctccttatcagcattgtagataatcttatcctttgtaaaaactgcatggattgtttccattgattggataagtcatagcctgtttaacaagtcaatctcaggatggtttacagtttttctctagtatgaaaaatgctgaccaggtgcagtgcctataatcccagcactttgggaggctgaggcgggtggattacctaaggtcaggagttcgagaccagcctggccaccatggcaataccccatctctactaaaaatacaaaaaaaaaaaaattaactgggctggtggcatgcacatgtaatcccagctactcaggaggctgaggcaggagaatcgcttgaacctgggaggtggaggttgcagtgagctgagatcgcaccactgcactctttgggaggccaaggcaggaggattgcttgaggctagactggacaacaaagtgagaccccttctctacaaaaaataaaaaaattagctggatgtggtggcacacacctgtagtcccagctactcaggaggctgaggcaggagaatcgcttgagcccaggaggtcaaggttgcagtgagccgagattgtgccaatgtactccagcctgggcaacagagcaagaccctgtctccaaaaattaaaaagaatgctgcagtgaacagtcttgtattctatcgtggaaggcttttgccagtatacctgtagggcaaattcctagcaatataattgcttgatcaaatggcatatgccttttaacttttaacggacattgccaattatgcaatgaaaagaagaggaaggtttccagagtataggctattgtgaagtttataaagagttcagtctatccaatagaataaagtcagcagagtttctgggggaacggcgaaagcaatacgcagcctaggtacatgagcctgggtattttgttcccaggctctccaagtcacagctatttgcctaacaaaatagtgtcctaaccacagaattttgtgctctgcatagtgcagtgattaaaagtaacccttgtaaaatgactttcccatcactgtttgctgtgtgcctccaggcaggtcagctccccttaaggcctcagctggccagtctttcctgtctgtaacatgaaggctaaaattacatgtctcttgccttggaactctgaatatgctaaagggtgcagagaactttgcactgctcacatttacatctcagtggttctgtaaggaagtggcagggattatttccactttcagacaaagaaacaggcctggaatctcctctgggttttggggtgcgaagggcagagttccccatttctgtgtctttctcttacccttcaagtgaacacgtttttagttattgccaggcctatccgcattctgagctccagcccaaaaggtcataggaaggtatttttatcttgtccctaccccccttcctttcgcatcccgggttctctcaggtctcttgggacctctcccactcccagccaggcccctcaccctgcaccccagggccccagcaccagcctccccaacctcctctgactcttgcctcccttctctccctcctctctcccctccctgctctcaggtggctgctgagatcttggtgagtgtcctgttcttcatttgggttttaacggcctctgagtaaagtccgcctttactgggccgagcggggcagtatcgagcagtgatttgggagcttgctgtgcggcttctctctctccccttccgggccctgcttggtaaaagataggccaggcaagtgtttcccaaacttcagctaatcatctctggcacgatttgtgctgtgtaaccaccagctattaatactgatctttaaatcgactcactcttaaacccaaaatgagttaaggggaatttactatcagtataaatagaactagtagctagctagaagacaatcatggaaacactaatgtgcagtgtgatcgggtgtgtttgcccttgaccccgcttggggaaacactggccaggccatcttctctgcatatgaccccatacacccttcccagaggggcttgcagaaaggttgagggatggaaggggaactcccagttgctatgctcagagtctatgtgggtcctcctaggagccccagccccacggtcctgaggctaggatggaagtacccagtgctaaggccatctttgtcagttcacagggtccttgtgaactggagaggggagtatagaagccattgtgcttgaggaaggaagaggggaccagtctcggcccccttggatggctgggtgagcccagcttctgactgccctcagcccaggcaaagacatgaaagtgaataataaccaaggctttctcatgtctcccctcccaaatccttgctccaactggggctctgcaggaaatagcagacacacctagtggagacaaaacttccttggagacacgtttcatgacgatcctgtgtacccggagctatccgcacctccggagaggtgaggcctgacctcctcccttcccagctcagcaggaagatcccagaatctgatgagagcctctcagctctctgtggcaagaggagcccgttgcccacccacctcctccttaacccagcagtagcgtgtcatgggtgacggcgactctggagccctgggttctagtcctggctctaccacttatacctcaccttctttctcctccttagggaagcaggtgggatgcccgggattaggtatagcaactggatttcacctcaaaggccaactctgattggtagtagctgcctagagtgctgtgttaaggattctggggtcccgcgtcatgattcactggcgatgcctgccaggagcaaggcagcgagaggtggtggtggcacaagacccacatagacatctttgaaccacaggctgccgcatgctcagggcacacctgtatgcagtggccctggcactcggtaatcatgaagtgtcctgcactgagacatttacattttaatgtctggcactacattaaatgtctacatttaatgtctggcacttctcagtatttaaggtgctttaacatagtggctaaaagaatggacttgggcactggacggccttgatttgaatcccccacttaacagccatgtgacctcaggcaagtcaccgaatctctgcgcctgagctcccttacgtaggaatcagggttttagctctacccgagatgattgttgtgaagatacaaaaaacataacacacataaagcactggcgcaatgcctgactcagtgagtgtttcctgagtgttatcattgtgtcttcatcccaagcggacacaggaggaagaggaggcccaggaaggagagggatcacccaaggtccctcagtgagctggggcagaaccatgactaggacccgtgctccttttactaccccagcctgggttcccagaacttggccgaggttctaagaccattggccaggcacggggactggcgtgggacagatttggctctgagcccacggcagccttgatgtcagagcttctctatcgggatgatcttgcccaatgcatttaggcctgggctgtggccatatttgctgcccttccactttctcaggcacagcctgtgggaggcactgggtggggctgaggaggggtcctccgcctcctgcactgaagctcacccccacctctggggcttctcttgtggccagtcttccaggagttcatcaagatgaccaactatgacgtggagcacaccatcaagaaggagatgtctggggatgtcagggatgcatttgtggccattggtaactggcagggactaagggaagggctgggggcactgggaacttgaacagattctctggaagaatagaaccttggcagcctccgaagctactactggaaagtaaacactgtcacagttcgcctccaggggtgctgccaaatgtgtgattgtgcaggaatgtcatgaggtctgtgcgaggctgcaggagagggtgagaaaataactgttgctagggaagaaccaggaagactggggcaggcaggggagggggcacgctgtcctgcacaactagggtgtatacacacacacaccacacacacacttgacacacacacctaacatatacaagacacatactatacacacacacattctcacatgtgacacacactcatacataaaacacgttacatatgcatgtgacaggtgcacaccacacatacacacatcacacacagaacacattatatatacacatacatgctacacccccacaagacactacacctacacacacaccactcacacactatgcacacatgacccatgcacaccacatatacgcagcacacatgcacacacatacaagacacatacacgctagatgcagatgacacacacacagaccctcgtctcctctcagtacctggctttttggttacgcttatataatttgagctcttgactttgaaaaggtttttcccttttggatcttaattccaccgtgtataaatatggatgagtggatatgggttagggctgaagttattctcattaatattcatcattagtggtatcttgtttcatttactataaaacacattgcatcaatgcacttttaaaaaatcttaccaagaggtatccgtggaagattttcacataattgccttcaattataaaacacatcttgatttcagagacactaaaatgtgggggaaaggtgtgttagatttgggtgaagtagaggtggtggtaggggtgttgtttagcacgtgatgggcctttaccacccaggagcaatatctaggaggcgggatagcccgacgaataaaagcatggaatccaggttgaatccctgctctgccacttactcactatatgtccttgggcaggtcacaaaacctctgtgtctcaatttcctcctttgtaaagtggagataacaacagtgcccagcccatagggtggattttgtgaggctgaaattagttaattatatgtaaagcacttggaacggtgcctcttggcatgtaatactcactggacaagggttagtttgtatttgtattgttgtttcccaccaagccctgcgcaaagttagttgcacgcaggtttagttacattctcatcaggtgctcttaaccagcttattttacaaaagaggacactgagttcagagaggcttatagcagtagaaccaggactcaaaccacaggctgcctacctccaaagctcatgttcttaacaccagaataattagcctttggagacactttcagattcctaccctcctcgtgtatttccctcttccctttctcctcccaccttgaacaggtatacacgtgcaaacacacaccacaacacaccatttcacactcctccatccaatggcaggcatcggggtcccatgtgacagatggacaggctcagtttttaggaagacttgtggggttggttacagaggagagaagtttctgcccagcgtgcttcttagccagactgataaagccctaggtctgaagtcagggaaggcttcctggaggtgatgtcatgactgggggcatggacatcaagtacagccttgaaggatgggatttgatttagagagataatgtagtgaagggcagataggaaatgcatctatccaggaaggacagagagacacaggaatttgcagtttgttctgggaatgggggagcaagggccatgaggttgcaaaggaggccaggagctttgacattcaagccaaggagcttgggatttgtttgggaggtagtagggagatatgtaaggagctggagatgggaggtgtgtgatgtgatcttttccacagggttcctgagcctgttgcagaggagtcttgcttgactctgccactggggtacgcaactccagcctcttgccgtctgttctcattatatccagagtcattccagctatagtactggtgtctggttcctcctttttaagctgtctgagacacctgtgcgtgggctctggagccttgcagtcaagcagctgtgaagggctagagaaccctaggctttgagaaagggcggggttggtgaaaccaggcaggcattatctgcagccagggtagggagcaggggctgccaatcctgcaagattgttcaggccctggggaaacactcagccccagggatttgcatggtcccttaaattttaccaacggacagtcattctttggagcaatatttctctaaatcagtaactctcaagcattaggctgcaccagagtagggtggccaaccatcctgatttgcgcaaggctttcagtgctgttaggttggtgcaaaagtcattgcagttttgccattgaaagtgatggcaaaaattgtaattactttggcaccaacctaataaaacctggagtgtcccaggcaaactaggacaagctggtcactcacctctagagtttcagattcagcatctctggaatctggaatctgaggcatgagaatctgcctttcttccaagttttcaagtgatgctaatgttgttggtccggaaaccacactttgagaaccactgctcaaaatctttccaaaatctgaatctttagggtggagcctaaaccctgagttttaaacaagctttttgggtgattccaatgcatttaaaaatttgaggccccgtgccttgggttcatgaggagttaattacctttgaatcctctcctgaccttggttagctgtaagcaccttagaaggaagagagttgcaaccaattgagagccaggcctaaggatgggccagaggaggaagcatggggaaggggagcaaaggtgtcgtctgagcatgaccctggggttgacaatgatctgcagacccatgcagggatagacgaggtggggagatgggggaggccggtccagagtctgggttcacagcctctgaccacgttccccgcatctctctgctcttcctaccagttcaaagtgtcaagaacaagcctctcttctttgccgacaaactttacaaatccatgaaggtaagaaaacatgctggcgttcctttcccttcaagcactgacttacatacacacacaaacacacagatgtgcaccatcccccagatcaggattcctggcagctgtttcttcccatttgacatttattagcatctgcccttgtctggctctaggatggtatttcccagttgggggtgatttcccccgccttcccccgccccggaggatatttggcaatatccagacacatttttggtcatcacaacttggagattgttgctaccagcatctggtggggacagaacagggatgctgttaaacaacctcagtgcaaaggataagcttgcgcaacaaagaattatccagccccaaatgccaaggttgagaaatgtgctctggaggcacacagggctgggtaggacacagtctctgccctctcagagctcacaatctatccggggacacagggtctcctaggacaaatagtcatcaaaggtcacaagcgctcccctctgagtctagtcctgcccttctgggagagcccaagccacactggccaccctctcagccactggagtctcaactgcagatagcctgggcaggtgggagggtaggaaggaacctgagaccctcaccctacagtctccaaatgtgacagccattcattgagcactcacgatgtgtcaagcctgtgccaagggcttcatctctctgaccacagctgaccctcatggcagtcctgtgaaattgtggtagcatcctcatttgatagaggaggaaactcaggcctaggtagggtaaaacgttgcccacatttacatagctcctaagaggcagagctgggactcgaacctagctctgactcctaggctggtgcttgtcgctccctgggggcagaggcagctctggctgcccacacattccatgccctgtgcctgctccttgggcccggtggtagtttcctagggctggtgtaacacattccagaaattgggtgacaaaagaaatttattctcatagttctggaggccaaaagcccaaaatcaaggtgtcgcctgggttgggtcctcctggaggctctgggggagaagcactcccctgcctctcctagcttctggtggttgccagaagtccttggtgtttcctggctgtgaatgcatcactccggtctctgcctctgtcctcacctagccacttttctgtgtgtatgtctgtgccctccctcttctaaagatattggttattggtttaggcttcaatctaattcagtatgccttcatcttaactaattacatgtgcaaataccttatttccaaattacatcatgttctgagtttccaggtggacatggggacactattcaacccacacacatcttttttgcgtgtcagtctggccagtcctgggcacagagggattttggtcaggactgtttgcagaagacagaggtggaacatccgccctgtttttggaaggaacaagggagaaaggcagatgggataccactgtttcttgcctgactgggctctatctctccttccgcctgtgtctccctcctgcctggctccaccagggtgctggcacagatgagaagactctgaccaggatcatggtatcccgcagtgagattgacctgctcaacatccggagggaattcattgagaaatatgacaagtctctccaccaagccattgaggtaaggggaggggctagaggttagcaggaagcgggtgagtgtcagatccctaatataagattagaagtctttattcccatggacttttttccagtgggttaccgcttagaacagccaggatattgaaatgaaagggggtctgtattgcattgtttataccgaaatcaattccaaaagaatcaaaggtttataattaaagatttccaaataaaacaagagcccattttttgctttttttaaagcaatgttatggaagtataacttacatatcatgggcaggcatggtggctcacacctgtaatcacagcacgttggaaggccaaggcaggtggatcacttgaggtcaggagttcaagaccagcctggccaacatggtgaaaccctgtctctactaaaaatacaaaaattagctgggtgtgttggctcatgcctgtaatcccagctactcaggaggctgaggcaagagaatcgcttgaacccaggaggtagaggttgcagtgagctgagatcacgccactgcactccagcctgggcaacagagcaagactccatctcaaaaacagacaaacaaacaaacgaaaaacttacatatcataaaattcacctgttttaagggtacaattcaacagtttttagtaaatttactgagttgtacaaccattcccataatgcagctggtttccaaacacttctatcatcccactaagctctctcatacctgtttatctagttccatccccagccataggcaaccaccaagctactttgtgtctctgtagatttgccttttctgaatatttcatataaatggaatcacctaatatgtgaccctttgtgtctgactttttgtttgtttgtttgtttttgagacggagtcttgctctgtcgcccaggctggagtgcagcagtgccatctcatctcactgcaacgtccacctcctgggtttaagcaattctcctgcctcagcctcccgagtagctgggactgcaggcatgcatcactatgcctggctaatttttgtatttttagtacagacagggtttcactgtgttggccaggctggttgctagctcctgacctcaagtgatccacctgccttggcctcccaaagtgctgggattacaggtgtgagccaccacacctggctgcgtctgacttttttgacatatggagcttatatttttgctctttgagatcagccaagatcttaaagtctgatgcttggttctacttggctaacgagactatgggcatctcagaggcagtctcttacagacttagtaggaatgtaagtaaattgttggcacattttgatactatattatgttttaaaatcatacatcaaaaaatacaaggacaaacaaaatcccgaaaaccatgtctcataacaatgataggagtccctcagaagggagatccataccataccatgggtcaggaagtttggcctccccagtctgaacgtataccagaccactgtgatgtgtggtgagcgtgatggtgtttgtacccattcccagcaatggcttggcagttagcactcaatgttgtttgttcaaataagaaatcacctaacacgatatgccaagggccatgggggagggtatcagcagagtgccaggggaaccaagggaggccagagttcactgtgcctcctgacgcaagagagtggccagagtgcttctcagaggagagggccctgctggcaaatgggattgggggtgcacaggggcatgttggacaggggagtgacaggtggagagaggactgagatgctcctgggggaaaggaacaggtgaagctgcagagctctgcacaggtcagatcccaaagggccttgaagccaggccgggagcttgcatatcttcctggggataaacaaaagggacgtggtcacatttatgtgtctgggagatcccagtagcctacatgtggcatgggatcctatgttggtcatggagagaagccgagggagatgtccagacagatgggcagccgggaggagggggcattgagactggaaggactgttttcactcactctgctctctgcctctgccagggtgacacctccggagacttcctgaaggccttgctggctctctgtggtggtgaggactagggccacagctttggcgggcacttctgccaagaaatggttatcagcaccagccgccatggccaagcctgattgttccagctccagagactaaggaaggggcaggggtggggggaggggttgggttgggctcttatcttcagtggagcttaggaaacgctcccactcccacgggccatcgagggcccagcacggctgagcggctgaaaaaccgtagccatagatcctgtccacctccactcccctctgaccctcaggctttcccagcttcctccccttgctacagcctctgccctggtttgggctatgtcagatccaaaaacatcctgaacctctgtctgtaaaatgagtagtgtctgtactttgaatgagggggttggtggcaggggccagttgaatgtgctgggcggggtggtgggaaggatagtaaatgtgctggggcaaactgacaaatcttcccatccatttcaccacccatctccatccaggccgcgctagagtactggaccaggaatttggatgcctgggttcaaatctgcatctgccatgcacttgtttctgaccttaggccagcccctttccctccctgagtctctattttcttatctacaatgagacagttggacaaaaaaatcttggcttcccttctaacattaacttcctaaagtatgcctccgattcattcccttgacactttttatttctaaggaagaaataaaaagagatacacaaacacataaacaca

SEQ ID NO: 66 - DNA, 38958 bp, Homo sapiens
  source 1..38958: mol_type = genomic DNA
atcttgcgggagaccgggttgggctgtgacgctgctgctggggtcaggtgaggagcggcgcccccctccctttcccacctcgtctgcctcggtggtcttgccctcggccagctctgggcgctgctgtcccggtgctagtggggcgcggctggagggcagtgtgggcctcccggatggcggcgactcggtttgcgcgtctcgtagccgggctgccggccggggtgtgttggggtggcgtgggtgaggcggccggcctggcttacgggaagcccttccgtccgtttggaaatcccagggaccagtggcgccccgccctcgggcaggtggaggggctgaggccggagcgtggcccagctgcctcgcgggaggctgagtagggaaacgcacgggcagtgctgaaagccgtctggctggtagtggctgtactttccggtgacacagcgaatttagggaaacttggggaaatttttactgtgtttagtgaaccgtaggacagaatgcgccaggccaaggtcgtacactggttctcgtttacagttcttggaagctattctagaatagcattccagatttgattgctgttccccgaccagcagcaaatctgtgttgaaattagctcatcctgtgcaaacactgcgcaaggaaaccaaggtgcagaggtagatggctgatgtccaccgtaaagtgacagacatgacgctgttgtcttccgactgccgtaaacgccctgatttttgccagctgatggccagctaatctgctaaatgtgtccgaattagatgatgagtgtaatgagttaccttccaggcaaggaaagagtttcaagcactgaataggtaaaagagataattttggccactgcaaactttcagtccttttcagtgaggactgtctttcagtcctcactggtggttggctacctacctgtccgtgcagaggactagccatgcctccatgttctttctccacatcactgacggatttaaatgatcctaccatacctagaagccggttttgcaaaattgtattcgctgttgcgcgtatcttcagtcacccttcctgtttcgtgtattttttcccccataaatttgcaacagctgcctcttgggttcctgggcttcatgccatcaatgagaaacggtgagacccagcccttttactaactgactcactgggtggaggtggtttggaaaaccaaaaatgattttctagtcttttaaaagtgattgctaacagagaatgtttaaaaaaaaaaaaaaaaaagcccgagcgcggtggctcactcctgtaatcctagcactttgggaggccgaggcgagagattcacgaggtcaggaggagtttgagaccagcttgaccaacacggtgaaaccccgtctctacttaaaaatacaaaaattagctgggcgtggtggcgcgcgcctgtaatcccagctactctggaggctgaggcaggagagtcgcttgaacccgggaggcagaggttgcagtgagccaagatcgccactgcactccagcctgggcggcagagagaaactctgtcacaaaaaaaaaaaaaacccaaaaaactctagacttactattcacttgggcaaagttgagaaattttttgagtcactctgggtgttatttagctttttacaaaaacgtttaaaatctgcctcttgaataaatgatatatgtacaattctaaaagggctaaagtacattgaaaagtaagtctcggccgggcgcagtggctgtcgcctgtaatcccagcactttgggaggcctaggcgggaggatcacgaggtcaggagatcgagaccatcctgactaacacggtgaaaccccgtctctactaaaaatacaaaaattagccgggcgtggtggcaggcgcctgtagtcccagctactcaggaggttgaggcacaagaatctcttgaaccccggaggcggaggttgcagtaagctgagatcgtgccactgcactccagcctggcaacagagcgagactccatctcaaaaaaagaaaaaagaaaggtaaatagtcttctccattgtgtcccagctcttcatccaggaagcagtcactgttttctacttccttgagtgtcctttcagggatattctataagtcaaaatcagtgcattttttacacataatggcagcacactatgcagtttttcactttgccttttttttttttcattaatacgtgttatagatggtttcatatatgggtaaaagaaaaagctgcctcatttttaataaccacataacacctccttgtatggctatccataatctgtttcacctgtccctcctttttaaaaatttaagcaatggccccgcacagtggctcacgcctgtaatcccagcactttgggaggccgaggtgggtggatcacctgaggtcaggagttcgagactagcctggccaacatgatgaaaccctgtctgtactaaaaatacaaaatttagccgggtgcggtggcacgtcccagctacacgggaggctgagacaggagaatcgcttgaacctgggaggtggaggttgcaatgagtggagatcacaccactgcactccagcctggatgatagagcaagactccatctccaaaaaaaaagataaaatttcaacagcttttggagtacaagtggttttttgttacatggatgaattatatggtggtgaattctgagattttagtcacccaagtaatgtacattgtacctaatgtgtagtttttgattcctagccccctttcaccctcccctttctgagtctctaaagtccattatatcacttcatacctatgtctttgcatactcatagcttagcttccacttacacagtgagaacatacggcttttggttttccacccctgtattacttcacttagaaaaatggcctccagcttcatccaagttgctgcaaaagacattattttgttccttttaatggctgagtagtattccatggtttatatataccacattttctttatccactcagttgatgggcacttagattggttccacatctttgcagttgtgagttgtgctgctataaatatacatgtgcaaaagtctttttcatataatgactttctttcctttgggtagatacccagcagtggaatttctggattgaatggtagatcttttttagctcttcaaggagtctccatactgttttctgtagaggctgtatagtagtgtaataagcggtctcttttccccacatccacaccaacatctattgttttttgactttttttttttttttttttgagatggagtctcgctctcgttgccaggctggagtgcaatggcgtgatctcagctcaccccaacctccgcctcccggattcaagcaattctcctgactcagcctcccaagtagctgggattacagtcacacgccaccatgcccagctaattttgttatttttggtagagacgggtttctccatgttggtcaggctggtttcaaactcccaacctcaggtgatcgcccgtctgggcctcccaaagtgctgggattacagatgggggctaccgcgcccggcccattttttgactttttaagaataaccattcctgtaggagcacggtggtatctcattgtggttaatttgcatttccctgatgattaatgatgttgaattattaatgattatttcatgttttttggccatttgtgtatcttttgagaaatgtctattcatgtcctttgctcagtttttaatgcaattgtttttttttctttgtgatttgagttccttgtagattctggatactagtcctttgttggatgcatagtttgcaaatattttctcccattctgtgggtggtctgtttactctgttgattatttgttttgctgtgccgaagctttttagtttaattaggtcccatctatttatttttgtttttgttgcgtttgtttttggggtcttagtcatgaattttttgcctaggccagtgtttagaagactgtttccaatgttctagaatttttatagtttcaggtcttatatttaaatcttttatcaacttgagttgatttttgcattggatgatagttagggatccagtttcattcttcatgtggcttgccagttttcccagcatcatttattgaataggatgtccattccccaatttttgtttttgtgtgctttgtcaaagagcagttggctgtatgtatttggctttatttctgagttctctattttgttccattggtctatgtgcctacttttaaaccagtaccatgctgttgtggtagctataggcttgtagtgtatttgaagtctggtaatgtgatgtctccagatttgtctttttgcttagaattgctttggctattcaggctgttttttgttccatattaattttaggattgttttttctaattctgtgaaaaatgatcttggtattttgatgggaatcgcattgaatctgtagattgctttgggcagtatggtcattttcacaatattgattctttcaatccatgagcatgggatgagtttccatttatgtcatctgtgatttctttcagcagtattttgtagttctccttgtagagatctgtcatctccttggtgaagcatattcctaggtattctatttattttttatttttgcagctattataaaagggattgagctcttgatttgattctcagcttggacgtttttggtatatagcagtgctactgatttgtgtacattgattttgtaacctgagactttaccgatttcatttatcaaatctaagagtctgttggagtctttaggatttccttggtatatagtcataatatctgcaaacagtgatagtttgacttcctcttttccaatttggatacactttattgctttcccctactttccctctggctaatacttccagaactatgtcgaataggagtggtgaaagtggatgtccttgtcttgttcctgttctcagggggaatgctttcaacttttccccattcagtatgatgttggctttgtcgtcatatatggcttttattattttgagttaggtcctttctatgcctcatttgttgagttctttattgtaaaggatgctggattttgttgaatgctttttctgcatctgttgagatcatatggtttttgtttttaattctgtttatgtgatacatcacatttattgacttgcatatgttaaatcattccagcatccctgggatgacacctgtcccttattgatggacattcacatggtttttaaccttttcctattacaaaaatgctgcagtgaatagccttgtacatatataattttgtccttgtgcaagtatttctataaggtacattcctggaaatggaattgcattctagtcttttatataattatttttcaaaatgtaccaaaattcactttcttaaaatagctttaatttttattatatacagataatctttgccttattttcatttttgttgacataattcctccaggctcttaaaggtaagatttaagatagtagctaaagaatttagatataggtcttgtcactggaacaatttcttgaaacttagaaatttaaattgcttatgatgtctttggtactgtaactgcatattgcctttcaaattactattaatttatctcataaattattttcagatttttttttcctttattttgaccctgacccttttgcccttggtctatctacttttctttttctttctttttttttttctttttccttgtcttgtcttgtcttttctttcaactggagtgcaatgatgcaaacacgactcactgccgccttgacctcctggcctcaagcaattctcccacctcagcttcctgaatagtttggactacaggtgggcgccgctgcactgggtaatttttaaaatatttttgtagggacgaggtcttactatgttgcccagcatggtctttaactccttggctcaagcagtcctcccaccttggcctcccagagttttgggattataggtgtgagccactgcgcctggcctatctgaccattctttagagcttttgcccctcctttactctttatacaaacccaggcttagaaaagaaaaaagcaaaaaaattcagcctgtccctgtttttatatccagccctttgggatcccaaatgattattttataattgactgggtcagttttcatatcattttatgtttcttattgacttatagccttgattcaatctatgtccgtttattctcaattcagcacatttttagcttctatcctgtgttcctgtcataagggacactatattatctcattttcctatactgtgtactcaaatggctgaatacttaatctttctatcagcacctaggacagtgctcattacacagtggactttcataaatgttgacttgagttgggtttatttggcatctgatataaaagaaatatgaatcatttacagctgtattgatgaaaagtgccaaaacatatatttacaaatttagaaaattaggtgtagatccagaaatcccaaagtattctggtatcagagtgtgaatcacagacctgcagaatccatatcacctgaaagctttagaaatgcagaatctcaggccccatcctggagctactgaattaaaatctctattttaacacgatccctagggattcatatacacattaaagtttgaggccaggtacagtggctcacgcctgtaatcccagcactttgggaggctgaggcaggcagatcacttggggtcaggagtttgtgaccagcctggccaacatggtgaaactccgtctccattaaaaatgcaaaaattaagcaggtgtggtagtgcgcacctgtagtctcagctacttggaatgctaaaggaggagaatcgcttgaacccaggaggtggaggctgcagtgacccgagattgtgccactgcattccagcctgagcaacagagcaagactgtctcaaaaagaaaacattgagaaacactattttagtcaactacgttgttcaaagaaggaagagaggagacttgagctagataggaggggtgagtaagcccaggcttgagggccaagtcagttaatgataagaatggcttaagcaaaggaatgctgggaatggttcaagtgatagagatttcacgttgagggttaggtgttggtaagaaatgagttaaatagataaatagagggtgggtgtggtggctcatgcctgtaatcctagcactttgggaggctgaggcgggtggatctcttgaacccaggagttcaagaccagcctgggcagcatggcgaaaccccgtctttactaaaaatacaaaaaattagccaggtatggttgtgtgcacctgtagtcttagctcttcaggagactgagatgagaggatcatctgagcccaggaattcgaggctacagtgagctgatgtcacactactgcactccagcctgggcgatagagcaagaaaccatctcaaaaatatatgtataataataataattggagccagtactaaggagacctgtatatcaggccaattaattttcatttgatactccagcagtagtcattgatgatttttgagctgaagagcaatttgctgaaagagcagcattttaggaaagtttagctagtgacagtgtctgagaaaattgggagggtgacagagtataagcaagaatataaacagaggaggagttttagtaagacaggcatcaagtgatgaaacttggtctaagtatatgaccatgagaacagaaattacagaagaggcatttcaaaggatggatagaaaaacactggttttggccgggcgcagtggctcatgcctgcgatcccagcaccttgggaggccgaggcggccagatcacctgaggtcaggagttcgagaccagcctggccaacatgacgaaaccctgtctctactaaaatacaataaattagccgggtgtggtggtgggcgcctgtaatcccagttactcaggaggctgaggcaggagaattgcttgaacccaggaggtggaagctgcagtgagccgagattgcaccactgcactccagctggggtgacaagagcgaaactctgtctcaaaaaaaaaaaagaagagaaaaatactgggtttcttactatactggagtattaggtaatttaagtagtggtgctattgacagataaaggatgttaagagtggtgtggtggagaatgacgagtattttattatacacatacagaaagcctcctgattgacttctgtcttaatctgctccttagtctattttggtgatcatccgtctcacagttacgtctcaccttttgccttgcaaataacattgttctactttcttgcctatctgtgtctagcacctttaaaagcctggtttaaacctttgatcattcactctccacttgtagcaatgttttcttgtagatgccaaaaaagtgattactgactttatatagatgtatttgccaggtatattatatctgatcactaatagtattttagatttttttgttgttgttgaaatggagttttgccctatcacccaggctggagtgcagtggtgtgatcttggctcactgcaacctctgcctcctgggttcaagcaattctgcctcagcctcctgagtagctgggcttacaggcacatgccaccacgcctggctaatttttgtatttttagtagagacagggtttcaccatgttggccaggctggtctcgaactcctgacctcagttgatccgcccacctcagcctcccaaagtgctgggtgtattacaggcctgggccactgcacccagccttttttttttttttttgagacagtattgctctgtggcccaggctggagtgcagtggtgcaatcttggctcactgcaacctccacctcctgggttcaaggggttctcctgcctcagccttccaagtagctgggactacaggcacatgccaccacacccggctaattttttggattttttatagagatggggtttcattgtgttagcgtggatggcctcaatgtcctgaccttgtgatctcctcagcctcccaaagtgttgggattacaggcgtgagccaccgcgcccggccctaatttttgtatttttaatagagacagggtttcaccatgttggtcaggctggtctctgacctcaagtgatccacctgcgttggcttccaaagtgctcagattacaggcgtgaactactgcgcctggccgtgttttagatttgatcaggctaagagggtattcttttgaatgtttgtttttttctctgtttatttacatttgctttaggttaatagtgttttcttcaaatgcaaaagatatatatatatatatatatagggatatttgtctttatccacactagctccatttattttacatgagccatcttttcaacaatggacaggagagtgtaatgaatccccatgtactcatcacccagcgtgagcagttatcaactcctgactgcttattatgtctaaattcctgcactatattatatagaatattcctgcatattattttggcataatccctgacatcgtatcgttttgtttgtaaatacttaatgtgtatctctaaaagatcagaatacttgatgaaaatcatagtaccattatcacaccaaaaaaatagtaatgtcttaacatcacttgatgtgcaggttattgtttacttttccaaatggaaatgagcaccttttgaagaacataactttcaaactttctggtacagactgcagtttttaaaagatatttccagtgttatgtttgctgatcagaagactatcaacttttgatcaccattattatcacagaatagataatatatgaatgcctccttaatctcagactaaccacactctaccaccctactttctttttccatcagaaagcattctaattttaaaattattctaagtctaataaaattgagaaagtaaatgtactgaaagtgttataatgaattaataaaagccaaacttcatgctaattatttttttaatattcttgtattatctatcacagttctctatgatcatagcagttaacacttactgaggacttactttattgcaggcactgctaaatgctttgcctttgttcttttacttaattcttacaacaacatccttaagtaggtacgttcacgtcccattttatagatgaagaaatgaaggcctaaaaaggctaagtaacttcctttgagaagctaagtaactgcccatattcacacagctggaaatccaggatgttagatggaaaattctgttggcagtgctggtgaaaatgcaaattggtacagcccctctggaggggaattgggcagtatcacattcacctttaccccttctcagcaatgccatttctaggaatcttccccgaagatagtattggcaaaatatacagagaggtacttgtacatggctgttcattgcaagactgtaatagttaaaagactagaaataactcagatgtctgccattgaataagccatgatacatccacacactgaagtactatgtggttttttgttgttgttgttttgtttttttttaagagacacggtctcactctgttgcccaggctggagtacagtggtgcgatcctagctcactgcagccttgaagtcttgggctcaagtgatcctcctgcccaggcttctgaataactggcactacaggtgcacaccaccatgcctggctaattattttactttttgtagagatgaggtctttctttgttgcccaggctgatctcaaacttctggctgcaagagattctactgcctcagccttccaaagtgctgggatttacaggcatgagccgctgtgcctggcctatgttgttgtttttaaaaaggaatgaagagtgtgggtgttggccataataaaagaaaaaagccagtaaagaaacagagtatgtgccgggagcagtggctcacgcctataatcccagcactttgggaggccaaggtgggtggatcaccaggtcagtagttcaagaccagcctggccaagatggtgaaaccccatctctactaaaaatacaaaaattagccaggcacggtggcaggcacctgtaatcccagctacttgggaggctgaggcaggagaatcacttgaacccaaggggcagaggttgcaatgagttgagattatgccactgtactccagcctgggcgacagagtcagactccgactcaaaaaaaaaaaaagaaacagagtttttatgtaagaatggaatgggggaatggggatacaaatatagacatatcagcttatgtacttaaagataggtagataaactgtaaaagtaatcatatgtaggagatagtaagggacagggttagaagttaacaggtttctgaacatatcttgttttgtagatttgactttagaatccagagaatgttttacataattacaaaactaaatcaaaaactttttaaaccttaaaagtcaaaagcaaaatgaaacaaatggacctaacgtgtgtcaaattggtagcataactacacaggaattattttcaaaatgtcgttaaaacagtaatttgaggctaggcctgtaatcccagcactttgagaggctgaagcaggcagatcgcttgagcccaggagttcaagaccagcctgggcaatacggtgaaaccccatctctacaaaaaaaatacaaaaattcaccaggcatggtggtacgcacctgtggtcccagctacggggtggggagggggggtgttgaggtgggaggatcacctgagcccaggaggtcaaggctgcagcaagctgtgattgtgccactatactccagcctgggtgacagagcaagaccttgtctcaaaaataaaaagtttataaaaaagaaagctagggtttaatccacgtatatgtgactccagaatgttaactcttaaccattgtaccattgtttcccataatgtggttatatcaccatatgaggggatttctgtggcacctagaaaggactttttattgtaatagctaagtatttattttaatattaccttctatttgtggtaagaaaactactggaagttttccatttaaaagtatgctgatatttaaaagtatgctgatgataagcatacttttaacataaatggaattaaaaattggcttaaagaaaaatagatcagccaggtgtggttctggaggctgggaagtccaagagcaaggtgctggcatctggtgaggactgccctctgcttccaagatgaagccttggccgggtgaggtggcttacgcctgtaatcccagcactttgggaggccaaggtgggtggttcacctgaggttaggcgttcaagaccggcctggccaacatggtgaaaccccatctctactaaaaataacaaaaaattagccgagcatggtggcagacgcctgtaatcccagctactcgggaggctgaggcaggagaatcacttggacccgggaggcggaggttgcaatgagctgagattgtgccactacactccagcctgggcaacagggtgagactccgtctccaaaaaaaaaagagaaaagaagaatagttcagtattggtatagtagtggtagaattgagatgtgacaaaaattgtatggcatgacaaagttggaacctttctaggctgtactgactccattggtgtgaatgatgaaataagcatttaataagctttgcttatacccctaatatccacattttaattttatgccagactcttttgaaaagagaaatattttgcataaaaccttgtgtgtgtgtgtgtgtgtgtgttgtgtatgtgtgtgtatatctgtatgttttcaaaggccttaaccattataagaaattacaggctgggcgcggtggctcacacctgtaatcccagcactttgggaggctgaggcaggtggatcaccaggttaagagattgagacaatcctggccaacatggtgaaactccatctctacaaaaaatataaaaattagctgggcatggtggcgtgcacctgtagtcccagctacttgggaggctgaggcaggagaatcgcttgaacccggaggcagaggttgcagtgagccaaaatcacgccactgcactccaacctggtgacagagtgagactccgtctcaaaaaacaaaacaaaacaaaacaaaacaacaaaaaacttacagaggacattttttattgttgttacagaatgtcatacccaggctatcccccaacaggctacccacctttccctggatatcctgtaagtattgccacttaatacctcacatccttaaaacaggtgttgtttgggactggcccatgtcagatcttacagatatgcttgagcaggggtcataaattcagatgctcagaggtactacgtagaagtgaggaaaggcaattgtgtgggggactagagaggtcttgctttgtctattgaaagctggcaggtgcttagcaccagccctgtgtagccatggagggaggcacactcagcgttgctagatactccagcccttcaagtaaagccagaaacttgggttctatgtgaaattgcccaaaggttcaaaatttaggagttagttttaaaaaatgttaactgctgtatgagccagtaaaacatggatgtaagcaaaatccatcccatgaatcactggttctttttcttttttttaatgcccttgagtcataatatcactgcatcttaacctttgtgttagaatgtttaaaataattaacggcttggctagacccagagataaattgcagtggatttgtagttcttagacttggagtacgttttataaatgtgctactaagttccaccttgttgatagctatactactctgaggactaagagctgagccataagtaagaattgtgcgtttcagtttttgtttgtttgtttgtttgtgtttttgagatggagtctcgctgtgcgcccaggctggagtgcagtggtgtgatctcagctcactgcaacttatgcctcctgggttcaagtgattctcctgcctcagcctcccgagtagctaggatttcaggtgcccgccactgtgcctggctgattttttgtatttttagtagagacggaatttcaccatgttggccaggcttgtctcaaactcctgacctcaaatgatctgccctccttggcctcccaaagtgctgggattataggcatgagccattgcgcctggccacatttcagttttttgtttttgtttttgtttttgtttttgagatggagtctcgctctgtcaccaggctagagtgcagtggtgtgatctcgactcactgcaacctccgtctcctggggttcaagcgattctcctgcctcagcctcctgagtagctgggattacaggtacgtgccaccacgcccagctaggttttgtatttttagtagagatggggtttcacaatgttggccaggatggcctcaatctcctgacctcgtgatccgcccacctcggcctcccaaagcgctgggattacaggcatgagccacttagcccagcccacattttggttttatactcataactgtggggctgctatctaaccctgggagaataggaagaggggtctatacaagtttatgataatatgtatccttatgcaaagtgattatatagctctcgtgaatttatcataggagagatgagaattatggatatgttcccaagtccctatgtattaaacaggactgtagtaactatttcagtcagtgtaggctaattgctaaaacagacaactcccaaatctcagtgacttaacacgatgaaaaaacaaatgtatttctttcttcagtttcctggacgtcagtggaggatagggggtgggtgggacgaggctttgtttcatgcagtgttttgggtttccaggctccttccttattctgatcctaccatcctttagcactttggagtcctccactggatcctctgcttatgggtggcagatgaaggaagagagagagcatggaggatttgccagaggtttttaggggacaggtttagaaagtggtgtatctcacttttgtctatgttcatttactgatattcattcatgtggttcgacctaactgcaagggggtctgggaagtgtagtctgtatagctttgtggcctggggagaaagagttcagtgaacatgcaacaatctctgccactctgcatattgctgctctgaaccatgaagtccaaaatgtcacatccggtgtgtgatgtgatatacaggttaccttttttatttttaaatattatgtaacagatccagatgtgttgcaagaaagcctcaaattcctctgtttaggatatagaggaggatctttctcatatttgtagatgctgggaaaatgaaggaactgatgagttttttttttttcttaaaaccttgaggtttgtaaagaatcctgttctgactcccaaatagagaagcagacccctcttgcctgactcaagtagaattaaatttaactgaattctgacaaacaagtgtccttacaaactggtatactgataaactagtataagataccaggatttctaatgggacttttaaaaagtaaaagaatgaggtagaccttaataataacctctgtttgttccttatttttagatgggtcatatttctctatgatcgtatttgtttaaaaattattctgatttttcagcctgcaggtcaggagtcatcttttcccccttctggtcagtatccttatcctagtggctttcctccaatgggaggaggtgcctacccacaagtgccaagtagtggctacccaggagctggaggctaccctgcgcctggaggttatccagcccctggaggctatcctggtgccccacagccagggggagctccatcctatcccggaggtgagttacgggttgcggaattagtaatgattgggattgctgtagcactttttccttctccctttatcctcttcattcctgcttgttttgtataaggtcaagtcgctcttaggtaaccttaggtagtaaggacctagctggcaagatggagggatgaagattctctggggacatgaaagctgggagcagtttcaaaaattccactgtgaagggacttggaataaatttcatggcaataaaggaccaatatgtaacactttgcttgtttgtagtcttaagacctgattaagacatttcaattagcaagactgtgacctttaggtcagctttattcaaaggtaaaaaagaccccaaaaaacaacaaaaaaaccttagcccttttgtattttaagttagtagggaagagtaataaagtaatattttggctgggtgtggtgtctcacacctgtaatcccgacactttgggaggttgaggtgggtggatcacttgaagcaaggagttcgagaccagcttggccaacatggtgaaaccctgtctctactaaaaatatgaaaattagctgggtgtggtggtgcatgcctgtaatcccacctacctgggaggctgaggcaggaaaatcacttgaacgtggtaggtagagtttgcagtgagccaagattgtgccactaaactccagcctaggcaacagagtgagactgtctcaaaaaataaataaatatataaggtaaaaatttaaaaacttattttttactggagaatttgaagttttgaatctagataaacagggactgctattatagcattaatagcatatttttccactgttaacaatagatatttttctaaagttttttctgcaatcatgagaactgtactatagtttattgacatgttcttttctctagttcctccaggccaaggatttggagtcccaccaggtggagcaggcttttctgggtatccacagccaccttcacagtcttatggaggtggtccagcacaggttccactacctggtaggtaccagctgtccagaaaaaaacagtatcatgatattttgagtttttaaatcaccattgagggaacttagtttatatttgagataatctgcaataaatgtttatatttccataaataattttaaacataatggttttatgaaatatattaaattgatggaaaagtttaatcagtaaaatagagataaagtcacactttttctattaaaaaaatctgtcccaaagccaaaaggaagccttcaggaacttctctgcccactcctgtaccaatagtaaaaccacccccagaactgtattctgacaaccattccaggtggactcagaatttaatctgattcaagtgtgaaaaaagtattatttatgaggatcttatgtagaacatggaatattaaaaaggttcttatgaccaaagttggttttagattcagtaaattatatttttaaaaactatcctcataagtatcatagtgtgaatgttcttgtatgtttccatattcatagtcatcaatgctgttttgaaaaattaaaacatgtaagacctgttgccgtattattattattttttttaacattataggtggctttcctggaggacagatgccttctcagtatcctggaggacaacctacttaccctagtcaggtattttgttcctaccttttaagctcactctaggtagctagataaagaaggaacctatcctttgctgaggtttccatgggtcggaggaaatggcccattatagtaatggaagactaaagtctttacttctgatagactccatactttctttggtccatctgctttaatagtgtcctgatgactttgagaagacaagcataggtctattctcataggtaatgattctcacaactttatcctggagattaacctggggtcttggttttagttctttttcctcttccttgcccttaccagcagttacacctatgaatttgggtggctgggtgattggtatttctgacagtgatttatgtagggtggttttgtttcccatttttacctttataacttttcactcttttttcagatcaatacagattctttttcttcctatcctgttttctctcctgtttctttggattatagcagtgaagtgagtaaggttttctaatgtttactaatcactaggtcctttatatgtgcctttgtttctgattctcatgtacttgtctctcactacttcttaagggctcacctgtatctattttatctttgtgttcctgtaataataggtagggctttagacatagtagccagttagtctgttgactggattttctcattagctgcagagtttcctatatgtcaaatatttgccctactccgtatggcttctttttttttttttttgagatggagtttcactgttggcacccaggctagagtgcagtggcacgacctcggctcactgcaccctccaccttccgggttcaagcgattttcctgcctcagcctccggagtaactgggattacaggcgcacgccactacacctgtcacatttttttgtatttttagtagagacagggtttcaccatgttggccaggctggtctcgaactcttgacctcaggtgatccacctgcctcggcctcccaaagagctgggattacaggcatgagccaccacgcacggcctggcttcttattttaatcccaaattttattcttaaattaccttgttaatttttttatagcctatgcaagttactaggaacaaaataagcagtatacttgatgcttacttttattttgattttcttattgatttctatattggatattcatgaatgtctagcattttcaagcttgttttaggctggggtaggagaaggattctagtattggaagagaaacatcttagtgatttttttagctcactttcctgatttgaggtatgtgagctccagagaggttgagaaacttgtctagggcaacacaactagtgaaggacaaagctgagaagattctagtctatatcttctgccttctagaccagcggtctctctcttatacaaagttgctttgctgatacagtaaatgatactcctcccaagcatgtagtaagttgctttcagtcctttttttcattgttgaagttgtttgccaatcatattataaacctgtaatcacttttgttatgaaaattttgattttagtttaagcatgcatataattttagagaaatcattttacgactgaatatgaatgacttttaaacatgaaacactaaaagtaaatcacatgtacttatgcaacttatttttatttttattttttattacactttaagttctagggtacatgtgcacaacgtgcaagtttgttacatatgtatacatgtgccatgttggtgtgctgcacccgttaactcgtcatttatattaggtgtatctcctaatgctatccctccccaccaccccaaccccacgacagtccctggtgtgtgatgttccccatcctgtgtccaagtgttctcattgttcagttcccacctatgagtgagaccatgcggtgtctggttttctgtccttacgatagtttgctcagaatgatggtttccagcttcatccatgtccctacaaaggacatgaactcatcctttttatggctgcatagtattccatggtgtatatgtgccacattttcttaatccagtctatcattgatggacatttgggttggttccaagtctttgctattgtgaatagtgctgcaataaacatacgtgtgcatgtgtctttatagcagcatgatttataatcctttgggtatatacctagtaatgggatggctgggtcaaatggtgtttctagttctagatccttgaggaatcgccacactgtcttccacagtggttgaactagtttacagtcccaccaacagtgtaaaagtgttcctatttctccacatcctctccagcacgtgttgtttgctgactttttaatgatcgccattctaactggtgtgagatgatatctcattgtggttttgatttgcatttctctgatggccagtgatgatgagcattttttcatgtgtctgttggctgcataaatgtcttcttttgagaagtgtctgttcatatcctttgcccactttttgatggggttgtttgatttttttcttgtaaatttgtttaagttctttgtagattttggatattagccgtttgtcagatgggtagattgcaaaaatgttctcccattctgtaggttgcctgttcactctgatggtagtttcttttgccgtgcagaagctctttggtttaattagatcccatttcttaattttggcttttgttgccattgcttttggtgttttagacatgaagtccttgccgatgcttatgtcctgaatggtattgcctaggttttcttctagggtttttatggttttagatctaacatttaagtctttaatccatcttgaattaattgttgtataaggtgtaaggaagggatccagtttcagctttctacatatggctagccagttttcccagcaccatttattaaatagggaatcctttccccatttcttgtttttgtcaggtttgtcaaagatcagatggttgtagatgtgtggtattacttctgagggctctgttctgttccattggtctatatctctgttttggtaccagtaccatgctgttttggttactgtagccttgtagtatagtttaaagtcaggtagcgtgatgcctccagctttgttcttttggcttaggattgtcttggcaatgtgggctcttttttggttccatatgaactttaaagtagttttttccaattctgtgaagaaagtcattggtagcttgatggggatggcattgaatctgtaaattaccttgggcagtatggccattttcacgatattgattcttcctatccatgagcatggaatgttcttgttcttccatttgtttgtgtccttttttatttcgttgagcagtggtttgtaattctccttgaagaggtccttcacatcccttgtaagttggcttcctatgtattttattctctttgaagcgattgtgagtgggagttcactcatgatttggctctctgtttgtctgttattggtgtataggaatgcttgtgatttttgcacattgattttgtatcctgagactttgctgaagttgcttatcagcttaaggagattttgggctgagacaatggggttttctaaatatacaatcatgtcatctgcaaacaggaacaatttgacttcctcttttcctaattgaataccctttatttctttctcctgcctgattgccctggccagaacttccaacactatgttgaataggagtggtgagagagggcatccctgtcttgtgccagttttcaaagggaatgcttccagtttttgcccattcagtatgatattggctgtggatttgtcataaatagctcttattattttgagatacgtcccatcaatacctaatttattgagggttttcagcatgaagtgctgttaaattttgtcaaaggccttttctgcatctattgagatagtcatgtggtttttgtctttggttctgtttatatgctggattacatttactgatttgcatatgttgaaccagccttgcatcccagggatgaagccaacttgatcgtgatggataagctttttgatgtgctactggattcggtttgccagtattttattgaggatttttgcatcgatgttcatcagggatattggtctaaaattctcttttttttgttgtgtctctgccaggctttgttatcatgatgatgttggccttataaaatgagttactgaggattccgcctctttctattgattggaatagtttcagaaggaatggtactaactcctctttgtacctctggtagaattcggctgtgaatctgtctggtcctggactttttttggttggtaggctcttaattattgcctcaatttcagagcctgttattggtctattcagggattcaacttcttcctggtttagtcttgggagggtgtatgtgtccaggaatttatccatctcttctagattttctagtttatttgcatagaggtgttcatcctattctctgatggtagtttgtatctctgtgggatcggtggtgatatcccctttatcattttttattgcgtctatttaattcttctctttttccttttttattagtctcatatgcaacttattttatgcaacaattaccaccttaagctggaactaaaaccagtaggtagaagttaacagaatgcagagtgttagattttggaagagcttttagatggaagtgaaataggctaccctgtgaggggtgagcttcttgtcactgaaagtccacaggcagattttggttgatgttgagtatggatgtgtctgtgtgtatcaaggaaggtgtaaaaaaaatttttgtcttagatgggaagttgggccagtttatccctcctgattgatccagttctctaattctgttatagtcttgttgttgttgttgtttcatttgtttgttcaattttgagtcagggcctcactctgctgctcgggtcaggctggagtacagtggcgtgatcaaagctcactgcagcctcgaaatgctgggctcaagcgatcctcctgcatcagcctcctgagtaactgggactatagttgtgcaccagcatgcccacctaattttttaatttttggtaaagatgaaggttttgctgtgttgcccaggctggtcttgaactcctgggctcaagcgatcctcctgcctcagcctcccaaaatgctggagttgcagatgtgagccactgtgcccagctctatgatagtttttcagcaagaaggttggaatcaaatgggcattaaagaagaatagcaaaggttggaacttctggtagcagattttgctgagaactctcccctagaatttaacctcaagaacacagatcctgatttctctctttttttttttttttttaagagacagagtctcactctgttgccaggctagagtgtgcagtggcgcgatctggggtcactgcaacctccgcctcccgggttcaagtgattctcctgcctcagcctcctgagtagctgggactacaggtgcgcaccaccacgcccagcatttttgtatttgtagtagagacagggtttcaccatgttggccaggatggtctcaatctcttgacctcgtgatccacctgcctcgacctcccgaagtgctgggattacaggcatgagccactgtgcccagcccagatcctgatttctttgaattcagtttaatgcctggaagatgacagtattcttgaaaatttacttcaaacttagactttcggcagagaatacatcaaaaaaatttttccctacagatgaaatatgaaatcaatatatatatatgtgtgtgtgtgtatatatatatttttatatatatatatatatatatatatattttacaaaagagaatcacagaaaatgagaatcatcaaatggtacacagtgagggttagtttatctattccagtgtattagaaacaatggcttctgtcctatttaggattttagtgacagcggttacatcaaaggaaacttagtttcttgagacatgaaggcttataaaatttttttatactcgactatttgctacaagtagaataattttggctttctattaaaaccactataggtatatttgttagttctctgcttacagccctagcttggaaactagtagaggatggatgctaaggcttactggtagaagaaaatgttggagtaaaaatatatatgagtgggaggagctattgacccataaaagtgttatcttgaaaagctgctgaaagatggggcttgttctcatctcctcagttgctttgcccccacaaatgctggtgtactgctgtattcaatgtgtataactttaaatacagtttctgttgtctaaaaagcattgaatcatcttttattttgaaatggtattgattgcatgtttaaatgataatactttggaggtattggattaaataaactgtgtgtgtgtatatgtgtgttttctgcagtgaaaacacttattttacaacagtaatctttattttaggtcaacattcaaacatacaagaaatgtgttgttacaattaaaatttttttaaaaagtagtggagcatcatcttcatcccatccctcttaagccctgacttgaacaccctaagaaacttcttgaattattctgggctggccgcacacctgtaattccagcactttgggaggccaaggcagggggatcacttgaggccaagaattcgataccagcctgggcaacatagcaagacccccgtctctacaaaagtaagaaattagctgggcatggtggcacatggctgtagtgctagctactcaggaggctgaggcaggaggattgcttgggctcaggaattcaaggttactgtgagctatgtttgtgccactgcactccagcctgaacaacagagtgagagcctatctctaaaaaataaaaaattgggggaaactattgaattatttcatagctttgtattttaaattgttttatcttttaattttgacataattttagacttgcaaaatagtacaaataatttgtatataccctttactcagattctccaaatgttaacttcctacataaacacaatgcaatgatcaaaatcaggaaataacatcgatatagtactgttacccaacctacagaccttatttcagtttcaccagttgtctcaatgatgtcctttttctggttcaggatcaaatccagaatgcaatgttgtatttattgtcatgtctcttaagtctcctttaatctgaaatagttcctcagtctttgttgttcatgcccttgatgcttttgaagaacactgtcagttattttataaaatatttcttaatttgggtttgtctgatattttctcatggttaaatccaggtcatgcctttttggcaagagtaccacagaaatgattttgtgcccccagtgcatcatatcaggagacacttattattgacttattccattactggtgataattaattttgatcatttaagttggtgcctgcaaggtttctctgctataatgttataggttatacaaatatcctgtttctttatacttttgccacctaattttagcacccactgttgattcttgcctgaaacagttactaccatagtatttgctaaatggcaatttttaattttcatatagatttatttcatgtataataatcagggtccatataggaaattaagagagattactaaaattatattgctggtttgaaatctcactgggcattcatgtgctacttcactaaagccattttatattcttctgtttttaaatcaaacattgtcgctcatctcacaccattcagggatcagtcttcttttttcttcctattctaccaaaaaggaaactatagtaagattgtgactttaatttcacaagtttggccatcttgtctcctggaagtttggtgtctggctatctgttggcaggagaaaaatctgtcctgaagggggataggtctttcctgtctgttccataatgagctctggtaataaaatgctcatatccttgccttaaaacccaaacattggccttcttacttaagattgatgtctggggaagtctttaagtttcctcattagaaacttactggaaatgctgacacggattttatgccttttattttcagcctgccacagtgactcaggtcactcaaggaactatccgaccagctgccaacttcgatgctataagagatgcagaaattcttcgtaaggcaatgaagggttttggtaaggaaaacaaatttttgtcttttttaataagttaaagtaatcagttctaaagtaaaaataaaccttatctcataaacccaagtttatgtgtcagcctgggtgcgcatacctggatttaatctgatgtctagtgccttgtaagcattctaagagatgacctcaggctgggtgtggtggcttacacctgtagtcccagcactttaggaggccgaggtgggcagatcacctgagttcaagaccagcctggccaacatggcgaaactccatctgtactaaaaataaaaagtaaaatagttgggcatggtgatgcatgcctgtaatcccagcttcacgggaagctgaggcaggagaattgcttgaacctgggaggtggagattgcagtcagcctagatcacaccattgcacttgcacccccagtctgggtgacaaactccgtctcaaaaaaaaaaaaaaaaaaaaaagatgacctcaagcagcacctagcatgtactttgtccttacttaaacatgtgtggttcttccagggacagatgagcaggcaattgtggatgtggtggccaaccgttccaatgatcagaggcaaaaaattaaagcagcatttaagacctcctatggcaaggtatgtttttctttcctggaatgagcaccagcagtggctggtagactctgcattcatgtcagattggatactatattttgattagtacctgtggtgcaaaagagggacaactagactttagagacctcaagggtactgtattccctatttctgttttttgttttgttttgttttgagatgaagtctcgcaccaacatccaggctggagtgcaatggtgcgatctcagctcactgccgtctttgcttcccgagttcaagcaattctcctgcctcagcctcctgagtagctgggactacaggtgcacagcatcatgcctggctaatttttgtatttttagtagagacagagtttcaccatgttggccaggctggtctctaactcctgacctcaagtgatccgcctgcctcagcctcccaaagtgctgggattacaggcgtgagccaccatgcctggcctatttctcttaaaaggctttttcattctagagtagtccttgatctcataatcataccttaccccagtcacatatgtgatagacattcagtagaaagtagatcacaactacaatcatgatcaagaggatggttctcagtcttctgcctgttacagtgggattcaaggcttattacatagcccttgtttattcttggtcctgggcatcgccttctgcttctctccctttctctaaacgtgtcctatgttaaaattatatggactgagcgtggtggcttacgcctgtaatcccagcactttgggaggccaaagcaggagaatttcttgaggccaggagttcaggaccagcctgggcaacatagggagacttcatttccaacaacgatgacaacaaattatattagctgggcgtggtggcgtgtgtccatagtcccagctgcttgggaggctgaggtagaaagattgcttgagcccaggaagtcaggctgttagtgagctgtgattgtgttactgcactgtagcctaggtgacagaacaagacgctgtctcaaaaaaaaataatatggaaatgcttgccattctctgtacacgccatgatcttttatgcttctgtgttgtgtacatgccattctcctggccttgaataccttttctttttttcatggcaaacttctttaagatttggcttaaatatcagctactctgaagtttctttcattagtctggacagaatttagctgcttcttaatactgtagtcccatagcactttgtaaaacctctgttattactaatctcacggcccacccccaaaaactgagctcccataggacaaaccatggtcatagtcatctttgtattacagtaccaagtatataatggcaagtagccacttagtacttgttgaatggatgatcagtttctaaatccaacaagattctatggctaaaaaatgccattgttcctcagatgtaatgggaaaacatggatagcactgctttgctttttttttttttttttttacttttttttgagacagagtctcaaaaggctggagtgcagtggcatgatctccgctcactgcagcctccactttccaggcaagagcgattttcgtgcctcagcctctcgagtagctggaattataggtgtctgccaccacacccagctaatttttgtacttttagtagagacgggattttgccatgttagcaagtgtggtctcaaactcttggcctcatgtgatctgcctgccttggcctcccaaagtgctgggattacaggcatgagccaccacgcctgacctgctttgccatttagataggaatcctaaaaatatcctaatgttctctgcatctagtttatatttctcagaatggggtagtggtccattgattggtcccaccttgcttattctattttgcctttccctgtctgcccagcccagtgactgattatgcaacacaaaccctagatctccttaagcttcaacatcagactcactattctcacaaagatattttccatgttatgaattttttatctagtctgcacaatgctgtctcaagtttttttatatattgctttagaattaaaactaacaatctaatttccgtaccactagccacctcttttcttaacttcctaattagtaaaacactgtttttctagcctgctatagtcatctttgagtccatgtttttcttttatcatagggagtattctgtatgctttgtcctagcagttggttatttactagtttttattgatctaatctataaaatggccctttaaaatgtttcttttgtctactttgttccttctcatttccattgttaccattcaagtccaagactttattacctcttaactaaatattccagtagcctaaatgttttcatctatagcttctttgtcaccatcatccattctgaatattgttgctacatcagtgccattttcttgcatgaaaagtttccagtggttcctcccagcaaacagaatcaagtccatattctttagcttggcattcagtgtaataatccaagatttagttacaactttgttttaactcatctattatgaaaaccttcctctgtagcaaaaccggttgtcttattgttccattgaacaagctttgctcattcttggctctatacgagtaattctcaaccttaactgaacatcgtaatttcctttaaaacttaaaaatacacagaatctctgagtcttagtcctggacatcaatgtttttctttttttttttaaagctccacaatgaatgtaatgaagagtcaaggctgggaaccccttctctgttccttggtggtgttccttcttacctgaaatacctttctccttcgtctttgcatgctaatttttacatttttctctgagctctccagctgactttgaactttttctgtttcaactttctctattacttatttctatgctacttacccagtgctagagtacaggttaccttacattattttttttttagatgtgtatctttccaaataagaacaatatcggctgggcacagtggttcatgtgtgtaatgccagcacttcgggaggccaaggcgggtgtatcacttggggtcaggcattcaagaccagcctggccaacatgtgaaaccccatctctactaaaaatacaaaaattagcctggcgtggtgggatgtgcctgtagtcccagctactcagggggctgaggaaggagaagcgcttgaacccaggaggcagaggttgcagttagccgagatcacaccactgcattccagcctgggccacagagcgagactctgtctcaaaaaaaataacaacaaaaaacaaataagaacaagatgataatggtttctacttcctcatagaaccaagaacagttccttttactaagtaaatatctgtttatcattttgtcagtttgaataattctttgtttcatatatcccttgtttttgtacctggtagagtggaataagattttattaaatgtttattgatagaatgaataaaatagatctgcttgagtgtaataaatgtgtaagtgtaacagactttaaatttatttacttcttttttatttctatttatttatttttttttttgagacggagtcttgctctgtcgcccaggctggagtgcagtggtgcgatctcagctcactgcaagctctgcctcccaggttcacgctgttctcttgtgtcagcctcccgaggacctgggactacaggtgcctgccaccactcccggttaattttttgtgtttttagtagagacagggtttcaccgtgttaaccaggatggtcttgatctcctgacctcatgatcctcctgccttgacctcccaaagtgctgggattacaggcatgagccaccgcgcctggcctttatttacttcttagtatattaacattcagctttcaaatttaggtttttataaagcaattccatttctttttttgtattttccttaaaagatttaagtgacaaaatttggagaacacatatacttagcttgtatttgtgattaaataggatttaatcaaagatctcaaatcagagttaagtggaaatatggaagaactgatcctggccctcttcatgcctcctacgtattacgatgcctggagcttacggaaagcaatgcaggtactactatatgtcatttattatgaatattttgtcctatttcatatgtaaaaccgtacaaattatgacagttctgaatttacagtggtaattaaagcaattctttatttcacatcatccatctgaatatatagtttttagttctacagaacaaagaaatatttgacgaagatttaattacttgcagaaatttcatttttctttgtataatcttcccttcatttcatgtagggagcaggaactcaggaacgtgtattgattgagattttgtgcacaagaacaaatcaggaaatccgagaaattgtcagatgttatcagtcagaatttggacgagaccttgaaaaggacattaggtcagatacatcaggacattttgaacgtttacttgtgtccatgtgccaggtgagtatagtatgaatgcttgtgcgttgatagagggaacatactttaaaagccttttgccagtgagcattctttattccttttaatatttagccaccttgcaatattgccatctttaagagggacaacacagaaaccagtgtacagatttctttgtagttactattgagatttattcctgtaaatctggcttttgtaaggaattagagatttaacctctaaggttgtatggaatcagaaaccaattcgaggctctgtggctgggatggggatgaaactgtacatttgagcttatcactatcctgcccattatgccccaccatcaagtgaagatgtgcaggactgccatagaggtgctacaggaagtgaggactatgtgaggagacccagaaatgcagaaaaatgttttagggttcccagtaataactgtgattagcaccttctttattttgattccccaggtgtgctggagaattgacagaaaatactccaaatagggtatttggaatggcattagaaacacacttagggccagacattgtgcctcacacctgtaattccagcacttttggaggccaaggcaggaggattgcttgaggccaggagtttgaagccagcttgggtaccatagcaagaaaccatctctataaaaaatatttttaaaaattagccgaacatggtggtatgtgcctgtagtgccagctattcaggaagttcagtgggaggatcacttgagcccaggagattgaggctgcagtgaactgtgatcgcaccactgcattccagcctgggcaatagagtgagatcctgtccttaaaaaaaagaaaagaaaaaaagaaaagaagcacacttagatgatgaaggtgtatttgaaagagattatgtaaatgactagcatgctgattcaatatcaagagttattgcctattgtgctagtgcacaagattggaccatctggagggatctaaaggagaggaggggctcttaagagccaagggaggggctgggtgtggtggttcatgtctgtaatcccagtactttgggaggctgaggcgggtggatcacctgaggtcaggagtttgagaccagcctgaccaacatggtgaaactccatctctactaaatacaaaaaattagccaggagtggtggcacctgtaatcccagctacctgggaggctgaggcagcagaatcgcttgaacccgggaggcagaggttgcagtgagctgagattgtgccattgcactccagcctgggtaacaagagcaaaactccatctaaaaaaaaaaaaagggaggtagctgtggaaaggatagtggatatggaaatgagaaagcaaagtaaatgggttgaaggaaattgaatttacctaaatcagagtaacaggagggcagtaggttaggatttaaaagaaacaagaaggaaaacagacaatgctaaaaaatggctattaagattttacatgaggtgctgagtctctctttatgcagagttcaaggcccagccctaccttttccagggcatgagtagaggagtaacttcctgagaaagtgtgtgtgaatccaaaggcaataatctgggaaattttttgtgagtaccttttcctgtgttatattcagtcgcccatgtagaatgtgcctctacgtattccttgtgccagttgctcagaagacagttcttcagcttcaaggaggatttttccatcttattccaaagatggtccctgagactctaaaaggcagccttttcttgtttgggtttgtctttctgtttttgagagaaaccaactgctcattaagcttaaactcttccttcctccttcctttcttcctattccagggaagagtgtggtatacaaataggcacagtctaacagaacatgagttatttgtagctgcttctgtaaagcttatgtgtcatttttatgcgtgtatttatggtaaatacttacatattaagattataattcgatggctgagtgtggtggtgtgagcttatagtcccagctactctggaggctgaggtaggaggatcacttgaacccaggagtttgaggctatgatcatgtctgcaaatagccattgcaccccagcctgggcaacatagtgaaatcgtgtctcttaaaaaaaaatattatactcagatgaagaaaagaaagtttatgaagcctccatattatatcctccctccctcctgccctagagttaaatttcttgagggcagagaccctgtctctcctgtgtccctaccgcttaacacagtgcctgacacaaagaaagtgcttaatgtctcttagtcgcatgaatgaataaaaagtagaactcagtacagtgcatattgatcttaaattccagctaagagagctgtttcttcatttgagtggtagttaatatctcctagtagagatatttttgtttaaacattttgggtttaatttagctcccaaaagccctcatttttaacataacctcattaaaccgtgatcttatattataaaatccagttgacagtataataaattactagttatatttccatgcatagaaatgaagcatatgcatgacagacattatggattaatctttaataaattatctctttaggccaggcccagtggcttacatctataatcccagcactttaggaggctaaggcaggaggatcacttaagcccaggagttagagaccagcacctgggcaacatagtgagacatgctgtctctacaaaaaataaaaaaattaaccaggcatggtcgtttgtgcctgtagtcccagctatctgggaggctgaggtggaaggatcacttgagcctaggaggttgatactgcactccagcctgagtgacagagcaagaccctatctcaaaaaaaaaagaaatagtctctttaaatccaaaagtgaactagattggaaaaaaaaaatttagtagaactattatttatttcttccaattcctgcctttctcttttgcagggaaatcgtgatgagaaccagagtataaaccaccaaatggctcaggaagatgctcagcgtctctatcaagctggtgaggggagactagggaccgatgaatcttgctttaacatgatccttgccacaagaagctttcctcagctgagagctaccatggaggcttattctagggtatgagcttttcttttgaagatttggcttctgctgtaagatacaaaaatatttaaccctttaattttgtttgcagatggctaatcgagacttgttaagcagtgtgagccgtgagttttccggatatgtagaaagtggtttgaagaccatctgtaagatatttttgtgctttgctttattttctttttaaatgagtgggagctttgaatagttgttcccattaaatgttgataatatagtccacgtggaatctgcttaggcagtagctgatctaatcctttggggtttgttttttgttgtttgttttctttattggataagcccccagaaacagtcctgtgtttttacatacaatttcctatgaatggtagttctgtgatcaaacagggctgtttggggattatttggccttcatctgtaggcctgtcttgataactgtgccagaatacctgatagttgtagcacttcctttaaagagaaagggaaagtcctgaggaactcacagtgtcaccacgaagcagtttgagtcctcaaaacagatatttcaggtactcagcccagtgagactcatttcctttttgaagttaaccagtttctggtggtctaatacacagatgtctaacaaagtgaaagtttcattctcatggatattaggactaaggggagtattagtaacactttggtattaacaatggaatgttgggccaggggcagtagctcacacttgtagtcccagctactcagaaggctgaggtgggaggatcacctgagtctgggaggctacagtcagccatgattgcaccactgcactctaggctggatgacagagtgagaacctgtctcaaaaaaaatcaaggagagcatctgaacactcttaactcaccccatgtttctgtgatgattacagagaaaataatcaaaggcaggctataagtgataaatgaagctggaggggtacacttcttgtgagatcatgattccatgtctcaaccatctctaacttgcagtgcagtgtgccctgaaccgccctgccttctttgctgagaggctctactatgctatgaaaggtgctggcacagatgactccaccctggtccggattgtggtcactcgaagtgaggtgaggcaggcctctctctttttgtcgggtcttacttgatgttcaatgttgatttcttaaaagttccccagttggttgtcagtccctcaaaaatgataagaaagagctctctttgccacctaaaagaggtggtataaagaacagaaaattcactttcctcatgctgtgggagaagcttgcattagtgaaataggccactctaccctaatgaagataatactaacagattttacaacttgagaacgtcaatggagaatacaaatttatgggaagttagacatttgtctttcgattttcattttgcttatataaaaattagatgaaaggcctatgtagattaatcctagtggatatcaacattatttaaatttagcatcctttattaataataaaacaatttttaaaatattcataattgtctcaagtatagcctcatttttaaaaattgtactttatatatttactccacttacaaaaaattttttttctcagaagaaatgacatttgaattttttttttttttttttttttttgagacatggtctcactctgtcacccagactggagtgcagtggcacgatctcagctcactgcaacctccacttcctgggttcaagcaattctgtcacctcagcctctcgagtagctgggactacaggtgtgcgccaccatgcccagctaagtttttgtatttttttggtagagatggggtttcaccatgttggccaggctggtctcgaactcctgacctcaagtgatccacctgcctcggcctcccaaagtgctgggatcacaggcgtgagccaccacgcctggcctgaacttttaattgaaagaaaacatggcggggtgtcgtggcttactcctgtaatctcagcagtttgggaggccaaggcgggaggattgcttgagcccaggagtttgagaccagcctgggcaacatggtgaaacctatttctacaaaaaacacacgcgcgcgcacacacacacacacacacacacacacgccggggcgtggtagcctgggcaacatggtgaaacctatttatacaaaaaatacacacacacacacacacacacacacggtgaaacctatttatacaaaaaatacacacacacacacacacacacacacacccacacccaccccccggcatggtagtcccagctacccagaatgttgaggtggaaggatcacctgagcctggaaggtcaaggctgcagtgagccgtgatcgcaccactacactccagccttggtgacagagaccctgtgtcaaaaaaataccctaaattattattattattgcgtgtttttttttttttttttttttttttttttgagatggagtctcgctctgtcacccaggctgaaatacagtggcataatctcggcttactgcaacctctgcctcccgggttcaagtgattctcctgcctcagcctcctgagtagctgggattacaggtgcgtgccaccatgcctggctaatttttttgtgtttttagtagagactgggtttcaccatgttggtcaggctggtctcgaactcctgacctgatgatccgtctgcctcggcctcccaaagtgctgggattataggcatgagccaccacacccggccaaaaaccctaaattatactaaagaaggtagattatttttaaagaaaacaaccagaatatggtattttgaaaaaaactttgttctttaacttaaattttcaaagcaggatgttttaagttgtgataaaatatacataacataaaaatttaccatttttaagtagcagtaagtacattcacattgttatgcaaccatcattaccattcaccttcagatgttttttcaacttgcaaaactgaaaatccatactccttaaacagtaactccccattctcctttctcccaactgctggcaacaaaccatgtgactttctgtgcctgtgtttgactactctaggtacgtcatattggtggaatcatacaatatttgtctttttgtgagtgttgtcttttacttagcatagcgtcctcaaggtttattcatgttatagcatgtcagaatttccttccttttgagactgagtaattaaatagtctattgtacgtgtatcccaccttttggttttttttttaattcatctgtgacacttggtttgtttctgcctgaataatgctgctatgaacatggatgtacaaatatctgttcaagtctactttcacttattttgaatatacccagaagtggaatttctaggtcatattgtaattctttggaagtgtttttgttttgctttgaggaattaaccatattagtttccacagcagctgcacccttttacttttccatcaacctgtgtacaagtgttcccatttcatggcatccttgccaatacttactatttttttggttttgataatagccatcctatcaaatgtttttaaatgactaatatctttggaataatagatgaaactagtactaccctgaccaagtattttacagagctgtgaatcagaccttcattgggtagtgctagcattggtatgagtgccagccataaaatgtcagtcacttggtgttttcccccccaagttttgattattattaagatcttattatttaaaaagaattttaagaaatgtcagttgtcacagatgtttttctgacagaaatattatttcttatgcagattgaccttgtacaaataaaacagatgttcgctcagatgtatcagaagactctgggcacaatgattgcaggtgacacgagtggagattaccgaagacttcttctggctattgtgggccagtaggagggatttttttttttttaatgaaaaaaaatttctattcatagcttatccttcagagcaatgacctgcatgcagcaatatcaaacatcagctaaccgaaagagctttctgtcaaggaccgtatcagggtaatgtgcttggtttgcacatgttgttattgccttaattctaattttattttgttctctacatacaatcaatgtaaagccatatcacaatgatacagtaatattgcaatgtttgtaaaccttcattcttactagtttcattctaatcaagatgtcaaattgaataaaaatcacagcaatctctgattctgtgtaataatattgaataattttttagaaggttactgaaagctctgccttccggaatccctctaagtctgcttgatagagtggatagtgtgttaaaactgtgtactttaaaaaaaaattcaacctttacatctagaataatttgcatctcattttgcctaaattggttctgtattcataaacactttccacatagaaaatagattagtattacctgtggcaccttttaagaaagggtcaaatgtttatatgcttaagatacatagcctacttttttttcgcagttgttttctttttttaaattgagttatgacaaataaaaaattgcatatatttaaggtgtacaatatggtgttttgatatcagcattccttgtgtaatgattccacaattaaggtcaggctaattacgtatctgtcaccttgacatagttaccattttttcatgtgtggtgaaaacacttaagatctactaccttagcaaattttaagtgttcagtacattattaactatagatactgtgctctacattaaacctctagcatttattcgttttataactgaaagtttataccctttgaccaacatctccccattttccccacctctcacctggacaaccaccactgtgtttaagttcagctattttagattccacgtataaatggtatacaata

SEQ ID NO: 67 - DNA, 523804 bp, Homo sapiens
  source 1..523804: mol_type = genomic DNA
actcctcagctgcaggagccagacatgtggagtcccagcagaggccaacctgtgtctcttcatctccgtgagaaaggtgcccccgaagtgaaagagatggcctggtggaaagcctgggtaagtgggagctggcaggagatttgggttcctgcatggtgttgggtgctggtcaccagggagtcctgagaaatgtaaagtcgcccttggctgggagtggctcagtctacatttggctgcctcctgggccaagcatggagggtgggaaggggccgagaagaaacagccccaggcctagagtgcccacggcagggatgggacctgggccgggagacaggctgatgaagaaatctagaaatgcaagggggaagctgaggtttgagaaaagtccaggggagggacccttgcaggggtggggccactcaaaggagggggtatcatggttgagccttgtgtgtaaatgtgtatggggtgcacacacgtgtgcatttggggagaatcaggcatactgctcctggcagagggaactgtgtgcagagggtcagagggcggggagcttggctttgagggaagctgctcagcacagctcaagggtcctggtaccggaggagatggacctggggaagcaggcagggccaggtcctgaaaggccttgcctggcaggctgaggagttaggctttaccttaagagaagtgggaaggcactgaagggctttgagcatgagagtaacctgaacctgctgttggggacccatcaatgccttcacctcagggatcaatgatgttcatttgtcaagactggagagggaagaggggaagcaggaggacctggcctgctagagcctggaggaacccggggctcagggcagcccatgcccagcagaactgatgggttctcgggagctttctgtctatggttgagcctgaggccatcgctgtgctaaggagttgaatatccagaaggggacagaggtgacatctcccggctgccggctctgcacacccttttcctttcctcccaggcagcctcaggatgtcagggctgcactttctgttttgcagatgatgaaatgaaggctcagagacactgagtgacttgctagggtccaatggccagcaggctccagtcagagagcagttgggtctctctgcccagccccaggttctctgtgagcttttgtgggatacccaggcttgtccagcttcagggagtctctggatcatagatgtcgcaacccaagcaagtgtcctcagggtcagacatgctaggttctggacaggtgggacaaagaggaagccaggctgaggtggggcagctgtcctggcccccagggaagcagacttcttccaggacaaggggccatggaggcctgcagcttcaaccagactgctgggaacctgcctttgaggaggtggacatggcagggagagcccagtgctgggtggtttccaaagtcagttgctggccaaggtagtctggcactgggccttgcacccagtgcagcaggacaaagggctgtccatgtagggacctgccaaattgacaggatcactgtgacactcactgagtccctactctgtggccggacccttctctaagcacctcacattcaatatctcccttgaacctcacaaggagtctatgaagtagacaccagtatccttatccacagatgaggaaactgaggcacaagtaggctaggcaggtgcccgaactcactagtaagtgtgagagtctaggtgagaatctgaacagcctgactccagggccaaaaccataccctggtcgtccataccccatgtgagagctggctcggggtagcaagttcacaggtagaccccacctgcaacagctgagctgctagcgaagacccagtgtcctctaggcacaaagctgggccaggaacgggatgggaggagatgagggagccactggagagagatctgtctgcaggcagggcccatctgcacctctctttttggtgttgccttttcctctgtgtctctcatagagacaaacccatctcccaggcctctgggcagccacatagcaggggaaggccaaggcgtggcagctcccctgtgcctgtcacagaacaagttatattaatagatgtagtcacaggctggtctgagtcaccttttcagtgaaaatgtgcctgtctggactagcacggccctgggcaagaccctgcaggagcctgaggctgacccttccttctcagcaggaggtctggagctccaggactccacactgatagccagggctccgattcccagaacacttattttctaaaaccttagagtgggaagtgagacagaggcttctcaatgcagcaaaatcagaaccagcccgggagctgcttacaaatgctgcacctgagacctaccgcacccctgcgggactgcatgctcctcagggatgcggttacacagcctgggcactcgctggtgcaccacagcccccgagtgctggggcagagggaagccggcaggcactgagagctgagatgcctcccacattcccagacgacctgcgttcctgtgggtgaagcttccttcagtggaacgttccaggaacactcattgcctgggaaaggtggagtcatcagtagggcaggggaggtagatagagctcagcttctgagtcaggctggggagtcccaacagcatcgcttactagctgtgtaagggagtccagatccctttctgtaaagtgaggcatcagtacttacctagcacaactgttgaggaagccatgacataagcattgcttctaaagcacctggcccaggtctggcacacacaaggggcttgaagtgctaacaggagtaatagcagagcgtgactccacaagcaagggatatcgtgtgtgtggacaccgatgagcacaactttatttgtttttaaacattcagggcctagtagatagcaggctttcaacaaatatttttgaataacaacaaacaagagtatggactttgggaacaggagagcctagtagccagcgagcctgagccaatccttgatggcctccaattctgagaagactctctgggcccccttaggctccctgtggaagaaagcttccccagtcaatcctaataaaaatacttctgagacagatctaacaggacaaagtggagtctctccactctttcagtagctccttcaccccaggtgctgtttggggttctgacactgccatggcatggccagcaggatggcccctagggctcctggggctgctctataagagcttcccacccctgacctgcagtccatgagggcaaggccagatccgggcacatgcccatctgtgttgttctcatgctctcagggggtagagctagtgtgttggacttggcatgtttagggtcacctccctgagggttgacaacctgagcaaaatcagcattcccttggcaaggaataaagggggaatggatttgtggtcagcaacccacatcgttggtcagcaacccaccgccaagcattctgcctgcaacagggtggggctggccaggggaggctcctcagggaaggtgaaagctgtgcagagttttgcaggatgactcagtgcttatcaggtagacagataaggaagaacattccagggagagggaggaatgctaacaacagcaggggatctggtctgtactagacatgccaaaggaatggtgtgtccatatcaacagaggagggagagacagaagagaaagagcttgtcagggcctgagtcagagcgggctcatgctgtggggctaagaagctcaaacgatttccagagacagtggggaagctttacagggacaggcaggggaggatcttaacccggctttcgtaagcctctggcttgagtatggaaggtgagtctgggacagggagcccagcgccgaagtgttgcaacagtatagggagacatacagaccaattccctcccacctaacagctctgtgctttggggtcctgggttagtttcctgggagaaggctggccttggctacctctgtccttgaccaaggacatcgttttaaatatttgtgatgtgtcctaggccactgcatctctgtccctgtagcgaagagaagatactgattcctaagctcctactctgagaacacaaatatctgcaatacctcggtaagccctaggcctgagtgtgaggttgcaggcacttccatggccccatgcaggtgtccaagttccctcgtggtatttggccaaggggggccctgtgtgatgccctagcgcggtgactacccgtgttcctggcccatgggcatcttccacggaattctgggcttagcctggggattcatgcgggcgcatctctgtgatctgctctggagcaggatgtacatcaggtctctcagacctgagtccctggtgcctggcgctcagccttgactgaagtgctcggcccaccctgctgggccagccagctcctgctcagggccacagccctgtaaccacggcttcctccccaggactcaggaattctcccactccggaatgccttgctgctggggtgaccaggtcttcacttgtgaaacaggagtcggccacctcagccctgcgcctggcctggtggaacatgggtcaccgccccaacctggggcagccgccccatcccaacgcagttgctgccgctctccatgcctccctgtgcccagctaaccgggggacttgtcccctgggaaaacctgggtacccaggctgcctttggtttcagcccctactcctcttcccgggctgcctgtgctccccggacggcccctttccccgggctgtgttcacatcagctgggaagggtcccttgcagacagatcttggacgaggtcgcgtcccccctcgtgaccagcaaactcctaaaagcggcccttgccccagagcccctgtagcctccaaccggcagtcaggaggcagcgccgtctcagcgccgcttagtggcgccaggcgtgcctggaaatccgctttcgcagcgccccctcgtagccgcctccgcccgcagaaaggcgttccctggacagagaagcgggcgcgcgggggcgggcgcgcggggccttgccggagaacctgactctccgcagcagcagtggaagccggagtgacgcgttgtgttgaacaccagttttctggagcgctgtgtgttctcaacagctgagcagtctgtttctccaatcaggtttcaaagccacttcaactgcactggcccctgtgggtcactgctgcaccgccctggcccatgtgggtccctgaggagcgacctgccggggccacctggctggacgaaaaagacacaccttggacttaagccgtgagaaaaaaacttcatcagtaagaaacaagtcaatagacaagtaaaagactaggagaaaatatgcataaaacataaaaaagtgacttgattcctgattctggagtatttaagaattcctataactcaacaaaaagttcagttttttaaaatgagcaaaaggcttgggtaaactattcacaaaggaacgtagacaaatgccagtacacacatgagaagcgcatacacatccacaaacttcaaacaagcccacctcatgtatttctagtgagtaaggaaaagaacgcaaacacttttgaaaattgtttggttgtttcttgtaaatttaaacaaataccctattatattatccagcgagtccatccttaggtttttatccaaggataaagaggtgaaaactcatatctaacaaatagacttctgaaaagatgaaaatagaagctttattcataaaagacaaaaactggaaataacccaaatattcattcacaggagaatgaataaacagactaggttgaatccatacaatggaatggtagcagacaataaaaagaaaatgaactattgatgccccctactgcacagcagaagctctgaatcgtgttcctgaatgaaagaagtcaggtatgaaagaataaacattgtatgattccatttatatgaaaatgaatctgtgatttaaaaatcagactagtattaggttggtgcgaaagtaattgcgttttttgcctttttttttttttaatagttgctttggggtttatggatggagtggcatggtagaggttagctgaagggggcatgaaataactttttgggggtgctagagtgttgtaaatcttacagtgggggagggacaggagtgcaggcatttgacaaaacacattgaattgtgaaatttaagatttttgaatttctttgtatgtaaattacctgccaataaaaacatgacgaatagagcagttatgagtatttgtgtgtagctttttgtgcaaacttaaattataatttctctgataaaagcccaggaatgtgattgttgagtaatatggtaagtgcatgttttttgagaaactgtcaatctatttttgggagtggctgtgtgtatcatgttatattctcacaagcaagggatgagaaatttggtttctctgcatccttgctagcatttggttttatcattatatttttatttcaactgctcaaataagtgtgcagtgatttctcatgatctcaatttgcatttccccaaaggctaatgatgttaagtatatttccacatgctgatttgactcggccatgaaatgtctcttcatgtctattgcccaatttcttatcagattttttttttttactgttgagttttgagagctctttatgcattgtaaatgtgagtcctttgtcagatacgcagtttgcaaatattttctcccctccatagcttgtcctttcatcatcttaacagaatattttgcagaggcaaagtttttaattttgatgaagtccaatttatcaattctttctttaatgaatcgtacttgggtgccatgcctatgaactcatcctcaactcctaggtccagatgattttctcctgtgtcttcctatcatagccagaaactagaaaagaaccaaaatgtccctcactaagtgaatgcttaaactaagtgacacatctatgccaatattcagcaataaaaagaaacaaattattcatgcaaataactaaatggatggatctcaagagcattaggctaagtgaaaaaaaccaatctcaaaaagtcacatactgtacgatttcacttgtataacattcttccaggggcaaaattataaacagtgaaaacagattagtggttggcaggcgttagaggcggtggtggggaagtgtgactacaaagaggtagcaggagagatcttgggatgatgggatagttttgtgtcttggtggttacaggaatctacacatgtgatacaatgtaatagaagaacacacattgtgctaatgtcagtttctttgttttgatattgttttgtagaatgtaaaacgtaaacagtggagaaactgggtgaaggatattgggaccccttcacaaattcttgtcaatctatgattatttgaaaatttaaaagtctaaacatgcataaaataaaaacctaaaaggcaaaaaagtaatgcacgcacttgataaaaatcaagtagtacaaaagagtaaatggtgaaaataaatctctgcaccactctagagaccccagccaaagtcctctccaaactctctcacagttattaagtttcttgtatatgcttctagaaattcatcttgcatatgcttctagaaaatcaagtagtacaaaagagtaagtggtgaaaataaatctctgcaccactccagaacccccagccaaagtcctctccaaactctctcacgattgttaagtttcctgtatatgcttctagaaattctctaggaatacgcaaaaatatatgtactttccctacttctctagcttttgtctaatgctagtcttctttctatttttaattatatgtatttaatatatctttaggaaaaattaatactttttaacagcagtgtaagatttcattgtgaatgtaccataatttatttaaccaatctctactcatttaatctgtttttggttgtttaggctggtttcggtagcttgttattggaagttattgcaataaacattcttatattactttgtatcatcataggatagactcctaaaatattgtgtttagatcaaagggcatgtggaattgtacttaagatagattttgtcaagaagtccccattctcatcagtacagaaggaaaataccaatttcctaaacctcttactaagacagtacatcttcaaaatttgatcctcactcatctggtggacaaagtatagtaattcagtgttttagtttgacttcccatgatgacaagtgaagctttaaacatgatgctttttatatatttaaaggccttttgtgtcattttcctgtgaactgttggctcaggtccgtccttcagtggagtttagtgaatctgcctcatttccctaatcaattctgtctcttaccactggaaaggaataccacagttgtttacccattcgttgacggacatttggattgtttctacttttcgggtgttatgaataatgctgctttgaaaacacttgtgcaagatattgtgtggatataggttttcagttctcttgggtatgtatctaggagtggaattccttggtcatatgataatactacacccaactttttgaggaactaccaaactgttttccaaagtgacagcaccatcttatgttcacaccagcaatgaatggggttttcaatttctctgcatcttcaccaacacttcttattgcctgtctttttctatgaaagccatcctaatgggtgtgtagttgtatcttattgcggttctatttgcgctttcctaatgactaataatgtcaagcatcttttcaggtgctttttgatcatgagtatatcttctttggacaaatatttattcaaatcatttgcccatgttttaattaggttattgtcttttattgctgaattgttagagttcttcatatattctggatacaagtggcttatcaaattttatatatatatatatatatatatatatatatatgatttgcaaatacttcttcccattctgtgggttgctttttgactttcttgatggtgtcctttgaagcacaaaagctgtcaattttgataatgccccgcttatttttttttgtttggtcacttctgcttttggtattatatctaataatccttttaccaatccaaggtcatgaacatttgcctctatggttttatagttttagctcttacatttagaactttggtccattttgagttaagttttgtacatgatgtaaggtaagtgtccagcttcattccttcacatgtggaaatccggttgtcccagcatcatttgttaaggcttttttttaatcctcttgaattgtcttgacacctttgtcaaaaatcagttaaccataaatgtgaaggtttaatattggattttcaattctattacatttctagtattgggctatcttgattcctagacgttggtagtaagtttggttttctttggggtttgggggggttgttttgtttcattttgtttttgagatagggtcttgttctgttgcccaggctggagtgcagtgccttgatcataggtcactgcatcatagacctcttgggctcaagtgatcctcccacctcggcctcccaagttgctgggactacaggcacacaccaccacacccagctaatctttttttattttttgtagagatggggtctcattatgttgcccaggttaatctcaaactctgggctcaagcaatcctcccaacttagcctcccaaagtgctggcattacaggtgtgagccactgcacccaacctgtattaagtttttaaatcaggaagtgtagtcctctctctttcaagatcatgttggctattctgggtctcttgcatctgcatgtgaacttctgagaaaaaggcacacaatctttcaatcaagattgcattgaatctgtagaccaatttgggaaacattgacatcttaacaatattaagtcttccaaatccatgaacataggatgttttttcatttatttaggtcttctttaatttccttcagtggtgttttattgttttcagtacgtacaagtcttagacttatttgttgaatttattcataagccttttattttgtctgatgccattgtaaatggaattctgttcttaatcttatattcagattattcattgctagtgtgtagaaatacaattgtttttcatattgttcttgtatctgcaatcttgctgaactcatttattagtcgtaatagttattttgtgaattccttagattatgtcatctgtaaatatagtttacatctttcttttcaatttggatgctattttttaaatttacatacttatttgcataattgccctagctcagatctctaatacaatgttgaatagaagtggtgagcatggacttcctttccttcttactggtcttagaaggaaagtatccactctttcaccctttgggatgatgtcagttgtggtttttcatagatgttctttattagatttcataaattctcctctatttctagttttatgagtgttttatcatgaaaggatattgattttgtcaaatgttttttctgcatctattgagattaggtggattttgtccttcattttattaatgtggtgtattaattagatttattttattatgttaaaccaactttgcattcctgaaataaatgtcacttgattgtgatacataatcatttttatatgtttctgggtttagtgtgctagtattttgttgataatttttgtattaatattcatgaaagatattgctgtgttctcttagaatgtcttttgttttggtatcatgagaataatgacatcatagaatgagttgaagtttgtttcttctatttttggaaaagattgtgaagaattgacaataatcttttttaaatgtttgggaaaactaatcagcgaaaccatttggtactgagcttttttgtgcatggtgagtttcttaattactaatttaatccctttacttactaaggtctattgaaattttctatttgttcttgattcagtttttgtagttcctgtctttctaggaatttttccatttcacctaagttaaaattttgctgtcttacaattgtttatagtattcctttataatccttttatttctatgaggtggtagtggtgtgccctatttcattctctaaacattattaatttaataatttaattccctatacattaataatttaataatttaatgtatagggaatgaaatagggcacataacttttttcttctcagtcaagctaaaggtttactaattttattgctcttttcagtgaagcaattactcttgttttttcccttagtgttttttctattccgttttatttatttccactacaatctttattattttcttctttctgcttgctttgggcttagtttgcgcttccttttctactttcttaaggtggaagtctgggttatcgagatctttcttctttttaatataggcatttacagctataaaagtctccctaagtattgctttgactgcatcccatacactttgatatgttgtgattttattttcattcatttcaaataattttctaattttcattgtgatttcttctttgacccattgattattttggagtgtgtcatttaatttctacatatttgtggatgtccgaaatttctttctgtttttggttttgaatttcactctgctattgttagagaacatattctatatgatttcaattattttaaatttactgcattttgttttatggatgaatatacatgtatgtgttttctattgctgccataacaaattaccacaaatttgcacctaacacaaatttattatcttgtggttctgaagatcagaagtctgacatgtcttactgggctaaaaataggaatctgtgtggttgtattcctttgtggaaattctcggagagttcccttgttcattcgagttgttggcagaattcagttcctgcaagttgtaggactgagattcccacttccttgctggctgtcagctgaactgttcccagcttctagaagctacccacattcccttattaatagtccccttcctccatcctcaaaggcagcaatggtggatcaagtccatcagtttagtagtcacttaaacctttctcacacctcaattgtctcctcctccttccatttcatctccctaccatggttaggaaagtgtctccacttttaagaactcatgtattttgattgggcccacccaaacaatccagggtaatctctgcatctcaaggtttatacccttaatcatatctgcaaagccccttttgtcatgtaatgtaacgtggttccagggattagggcatggatatctttgggggccactattcttctcatgacaagatttattcttgagaacattccatatacacatataaagaatgtctattctgttggtggtggtggagtgttctgtgggtaactaccagctctagtgggtttactgtttttttcagatcttctatatccttgtggatcttctgcctagttgttctatccattgttgaaagtggagtaatgatgtttccaactataattgttgaattttctatttctcacttcagtttttgcttcatgtatttggatctctgctattaagtgcatatatattcttaattgccatgtcttcttaatagattgaaacttttacaattataaaatgtttttctttgtctcttgtaataatttttgtcttaagagtctatttggtctactgttagtataactagccactccagctcccctttggttactactttcatggattatctttttccatcctattactttcaacctatttgtgtctttgaatgtaaagtatgtctcttatagataacagttgattcattttttaaaatcacaacctctgcattttgattggtatgtttactctatttacatttaatatgatttactgaaaagataggctctacaccttccattttgctatttttatatgtcctacatcttttttgtttttcttttccctcattactgtcttcttttgaattcaattgatattttctagcatatcattttaattcttttgtttgttttaccatatatttttagttattttcttattcttgccctggggattataacattttatcataaaacaatctaatccatatcaatccaacttaatttcaacaatatatttaaagattgcttcaatataggtccatttcctgcccccttcctttgtgttaatattatcgtacaaattacatctttatacattataagcccaacaacccagttttataattactcatttatgtagctatttttaaatcagataggataagaaaagaattacaattaaaaatacattatactgtctttttaattatgtaattaccctgcagtgctctttatttctttgtgtggatgaagttaccatctagtgtcctttcatttcagcctgagagactccttttagtatttcttgtagggaagatctactcatgatgaactctctcatttttcatttatctggacatttcttcttttttttcaaagatacctttgctagatatagaattcttggttgacagtcattttcttacaatacttttaatatgttatcccattgccttcttgcctgaatggttttgataagaagtcagttgttaatcttattgaggaatttgaagctagagtgtatatgctgagttatttttcttttgtagctttcgagattctctttttgtcattggcttttgatagtttgactctgatgtatctaggtatggatttctttgtttttataccacttgtagttcgttgaatttcttgagcatgtaaattaatgttcttcatcaaatttgggaagtttatggcaattatttcttcaaatattctttctgcccctttatctcctcttcttttgggattctcattatatacatattggtatgctctctgaggctctgttcatttttcttcattcttttgactttctgttccctggattgtataatctcaattgacccatattcaacttactgaatcttttttctgcctgctcaaattggctgttaagcccctctggttaataattttttatttcagttgcactttcaacccagaattttatttttttcccttttttatataattttctatctctttattgatatgctgtatttggtaagacatcattgtcatgctttttaacattctttaaacatgttttcctttagttgtttaaacatgtttttaagacgtgttctaaaatctttgatagtaagtccaatgtctgggcttcctcaagaaaaagtttctaatggcagctttttccctgtgaataggtcacacattttgtttctttgtatttctcatatttttttcttaaaaactgaatgttttaaataaaataatgtggcatctccaaaaatcagacctcacccctcttcacaatttgttgttgcttctgtttgttgttgttgccgatgctgctgtttctctgtttcgtgaatttcctggactaagttttaatgtatactttttgtcatgtgtagccaccgaagtctttcctcagtttagttgtccattaatttttggacagagatttctttacattccttgcacaactaaatctacctacctttgctgggaagctttgtttgtgttgagccatgccttcgatgcttcagcaagcagctgacaactctgcctcagagtttacttcctgcttgcacagagcctcaaagccaaacaaaagttaagctctagttagatctgtcttggacatgtgtacaaccctgcacgtgcacatggccttctaggttcttaagaatatgtcagagtttttccaaagcctctatgaatacctcattccccagtttttccttgtaactgttttggtcagcctcttattagccccaactggtactgccatctcaggcagttgcaatgtcaaacaatttttgctgattgtttttgacagattccctcaggatagggctgttcacacagactaagctccaaaccatgttaagcaaagacaatccctgggaatgtgccttttccagggagctgtcagacagatcaaatagtaacaactttctgaggatgggatttttggagagctctaaacctattctgtcctccccagtggctaccaggctgctggttttcacagctgtcatggttgtgagaatgttaattgtgtgtgtgtgtgtgtgtgtgtgtgtgtaaagacagaggttgtctctgtgttgtccagactggtctcaaactcatggacttaagcaatcctcccatctcagcctcccaaagtgctaggattataggagtgagccaccatgcctagctgagaacatttatgttcaagtctatcatagagcttggaaaagaagactacgaataaggcaaattaaaacaccacaaaatttgctattcttactgagattcagctgtgtttcttgaataaatctaacttggattgctgaaagcctttggttaatttccaggactctgaaaatgttaattttgacatttttgccagtgctctcattgttgttaaggaaggattttcagaagtccttattctgacattctgcaagtgtttctcttggtttgagttttcatgtgattgtttggggtagttgtttttatttttgttgttgtcttgattggtttttggagagatggttttctactggatactcctaggattcttttctttgaaggcaaacattcattttgttaggatctgtcatctcagcattgacttctctaaatcaatttacccttcagtcagaaaattcaagtcttcctttatttcaggaaagttgttctgaatattgagtctaagtttttttctattccatagttcaggtttcctaaccaggggacagaatgtcctcccctgcactgaatggcctctgcctttgtttactgaagactgcctgagtatcacttgcaatttaaaacagggcctgtctgtagagccttctctgtacccaggacagtttagaggcgtgtctgtgtttccacaccaacagtaattatagtaataatgattactacaaggtgagcatctaatgctttgaaatctgatatcatttaatgaccccagctaccctgtgaggtgggtattatcttcatttgcagatgaagatactgcagcttagtcagcagactaagtcacctaaatgctctgtcagaagcggaatttgtactcaggaatggccaactgcaaagtccatgtgcttgaacagtatggcatactgatacatgcacctgccatgaccagaacacaatacagtgatctggcagcacttcgtggctcaccatctctgctatactgataacaacttgagggctggacctacttatcttattcaacaaggaccctctcagaggttagggttgcccagtgcaaagatagcaagtcatgtgacacatgggccacctcacccctcctgcagccattgataactttcttctttgaacatggcattctttcgctctaagcccagttaagaattcagaatccttctaggcccagtttttaaagcagccaccaccaatctattggtgctgacatgaattcaaaagatactttctatcccttatctaaatagttcataagatgatgaggctgaactatggaacaaatgtagtccatcagagatttctagaaaaaaaaaacaactctcaatagtcctagaagtttggaaatgagtattaatcccaggataatccagacacatcttgtcttatggcctgatgccaagtgatgtggcccttatctaatagcacatttgcattttaaatgagtaaagctggttaaacctctttttctaatttcagctattattttatctacaagggcctcatagacattcactccacccaacaaccacagaatatacattcttcctatctgtacacagaacatattctcagatcaaccatatgctgagtcataaagcaagtctcaataaattttaaaaaattgaaattataccaaacacactcttggaccacagtgcgataaaaatagaaactaatatcaagaagatctctcaaaactacacaaatacatggatattaaacaactttttcctgattaactcctaggtgaaaatcaaaattaaggcagaaataaaaaaatctttgaaagtaatgaaaatggagatacaacttaacaaagtctctgggatacagccaaagcagtgttaagaggaaagtttataacgttaaatgccttcaccaagaagttaaaacaatctcaaattaacagtctaagtttgcacctagaagaactagagaaaaagagcaaaccaaccccaaagctagcagaagaaaataaataactaaaattaaagaagaacttaatgaaattgagatgcaaaaatccatacaaaagataaatgaaaccaaaagttgattttcaaaaaaataaacaagactgagagaccactagctagattaacaaagaaaaaagaatttccaaataagtactgtcagaaatgacaaagatattacaattcatcttcatttgcagatgaagatactgcagcttagtcagcagactaagtcacctaaatgctctgccagaagcagaatttgtactcaggaatgtccaactgcaaagtccatgtgcttgaacagtatggcatactgatacatgcagaaatacaaaagatcctcagaaaatactgtgagtaattctatgcacacaaattagaaaatctagaggaaatggataaattcctgggaacatacaatctcccaagattgaatcaggaagagactgataccctgactagaccaatatcaagctctgaaattaaaccaataataaaaaacctaccaacgacaacaacaaaaagccctggactagatggattcacagctaaattctatcagacatacaaagaactggtaccaatcctactgattaaacctctttaggttctgctttttgtattgttaaaatcttcatttttggttttctaacggtctctgattcaaacattcgttaccaataaacaatccaggtagcctcaccctgagtggcagcctggctgggtgagttctaaaaatgcccaagacctccaagactaggtgagatctgaagtaatgaaatgcctccattcactaaaggcctgaaattgtcctgactgcctcagtcccacggaccaagaagagcctttcaagctgtgatcccaatacttgtggctgctgtgagaataaggaaagcagcctaggcctccagtggaaggatcagatgtttgcccttcatacctcagagagccttcatccaagtaagatgggtggtgaggagctgtggatgacagcatgaaggatgaggactgatgcagcagccataattagattataggtttccatgggatgtgccatgactgcttacaaatggggcccagccatggaattgagttatcaactaagctgattcctgaggcacagatcatcctgtcctccacaacatgattaaagactacatgatgctcaggaagacctctgcagctgtgtgcttggaagagtgtgtttttcctgctaaagcataagaaaaaagagaccagcaattattatcttaggccttgcagcatcctttctggtcccacaagtttgagaaggcaggtgtgtgtgtgtgtgtgtgcatttgtgtttgtgtgtgtgtgcacgtccacatgcatgcatgatcctacaatggaagtgagtacgcaaaagttgattgcctatataccctccccacaaccaggtgtataagagtgttctttgagaatgagaaagcaggaaggagcacatcccacaccttagcattcatgtagtcaattaggaactcctgagctcccatgacatgctagaccctgggctcagcactggatctcagacatgtcccaaactgggcgatggaagtggtgggaagcaaccactcatggacagcttcccgtgtgccaggagtgtgccagcattgacattatgccgtctctcactcctgccctccatcacattagtgattctgccatgagtgactcgttcctttgggttcctgttaagttcctgtggaggggtctagccacagcaggggaaagagcaccgagggagcttttaggaaactctgctccaggtcagctgtgtgatgctgaaaaaatggctcaccctctctggacctgtttcctcttttgcacaataagagggtggtgttctccaaggtctccttgaagatccgacttatccttggtcatcactttgcagagggcaggtcctgtccccaagcccaccagagtggagctgggaaaagttccatggtgaagaaaaggcaggggacacaactctgagagtcattcctttgaagattgagcccagagggctcagtttctggattgcatggggcactttgtctctctctgctggagccacgcacccctggtgcagtagtttctgccctgcccagactctggtcccagaaggttgacataatgaggaaggaatgagcttgccagctctgccatgaccagcaggctgccttgggcaagtgcttcacttccctgagcctcacttcctctgcctcatcccttctcagagaccactcctcatttaccatcctaaagtctgacccgtcctgacaaccattattctctctccatcccctggtttttctctttaggacagttactgcattctctatctcttgttgtttcttaggtggaggaggtacctgcctcctccctacctagaacgtgagcctagtaaagggatgggcctcacctgtttcaggtttgacctccaatgcccgtcacgtagaagctcaacaccatttccaatgccagaagtgacaggacaacagcaacaatagcaatatttctgtaccactcccctcactttccaaagagaagtaattcccagcttggaccttcccttgctgggaggggtgcccaggtgtggcctctctgtgaccttggaccctggctccggcatatgccagcctggcctttccccagggtagggagctggcaccctgggcattccccagccagcatccagccttcttgggcagggcctttccacaccattcctcccaaatcctcactggcccaccctggaacaaatgcaggcggaagctcgcatccccacctctgctgtttctgctgggtccccaaagagctttctttagggaaaaagaaagcaggccagtgcctgctccttttagaccccacagtggggcatggggtgggccttggttggccttaattttccattcacctgaggagtggctcaatctcactcattcccattgcaggtggatgtcagccaaactggatgcataaggtttttgtgatttaggagttgcaacaggggagataaaacgcctaggaatgtcttcagttggaaaaaaggggcacgatcctcacattctgtaacctgagcactttatctcctctctccccttccttcactgatacaagaaaggagactccagcactagtttcctcagtccttctgcagggcgggccttctcacggcctcaaagtcatggagaagagtgtgcacaggacacctcactttaagcaaagcccatagaccgtatttgagaaaaggagttaaataaagaggcagccaccaacaaaccagagccctgtggtcactcaggtcccatagactctagaggtcaaagggcctccgagcatttgagaatcagagagggcaagtaacttggctgatatcacatagcacgaaggtggcagagccaggattccacctgctggcctcccagatgtctttcctgttggaccctgcttgctggccactcctggtgggggtcactccaccattagtgtgttcatcaaactgacagttgtggtccagatcccttgcctctggtgtgcccagcaccttagctggcacctccctcagcaaacccagccttcgccatcctcccaagcatacttcccagggctgttttgtccattacggtcccagaatataaggcctttgggttttttcagggcctgtgaaaaggtttgaaaaatgaaaaacacactggcagttccaaaattctcaaataaaactgtagaaatgccttaggaattaaatatgtaataagatgtgaacacttcattacacacctacaattagtcacatgcctacgatatgtgaataatgtcaggtcagctagtgaactgttatacagtaattgcgcatcacttatatagatatacacaaagtgcacttactgacttggatgtgtgtgttcattgtttgaagtggcgtggatggaggctccaaaagataaaagaatgtaggggaggtgactcttcaaatggccctcacccaccccttaccctcagctcacccaccatgaagcttccccttccaaggaggacacacctcctttcctagaacattcttcagtgccacaagctgctcagtcagccctgattctggagtctccagtgagcgaggcctggggtggccccagtgggatgagccacactccccacagcactcagcctggatgtggcactggctgcacatagcaagaggcagctattggacacctgctcgccacatgttctgtcttatcctcccagcaacaccgagtgagggagggagtgttaacccaccattcaccaggtttaccagagaccaagcccaggatctctccactgcacacttttaaaagggtcctttcagcttcccattaaagaagtttgttcctttgttcctcctctcctgttcttcctaagacatcatcactgaaatttaagcttataaatttaaaatgaagtaaatctataagggaaaagcattaaaaaagagagaaagatggcttactaatggatgagagtccaacacatttctggaagacaaggttcatgagaggcctagcactgtggctcccacctgtaatcccagcactttgggaggctgaggcaggaggatcgcttgaggacaggaattgaagcctgcagtgagttaccgtcacaccaccctactccagcctaggcaacaaagcgagaccccatctcttagaaaagaaaaaagaagattcacaagagggtgtggcaatattagacaggctaagcccccaggtgtacccagtgtaaccacaggggcccttcggtggaagggagaagcagaagaggtcagagtgaagccacacctgctgtgacaatggagggagaaagtggctggccaaggaactccatcagcttctagaagctggaaaaggcaaggaaacagtctccacccggagccttatgggaacacagccgcctcatgggaacacagctgccctgtgacactgattttagccccgtgaggcccatgctggacttctggcctccagaactgtaagatttgtggtgctctaagcaaatcataaatttgtggaaatttgttacagcagcaacagaaaactagcacaggcagcctacgtgctaattctcatcttacctgaggtggggagtacaatacaccctgcgttagttggaaagctgaaacaattctctaatgctaatactgaaattgtcaggtcggtgtaactgtgacagtccggaagcaatggaggcttcagtgagcaggaccagctgcctttctcaccaccacagcttgatctctctcacaacttcctctccacctccactgacctctgggttggttttctcctgcacgatctttccacgtgtcaggggcctggaggcaccctacaagagctgattttacatttccttcctagaggtaatcccagaacaaaagagagcagttttatttatttttttcaagagaattaaattgtttattgattacacatgataatggatgatacacaagcttcattcccatctataatttaatctggtaccattattcaattagatatgttacataggatgtgccaacaattacttttataaccaataattccatgattttgcttgggtaatcccttttaatggtgactgaaatcatgactgaccgagtcagtggctagaaaaggggctttgcctttgtaacttttgatgaccatgactccgttgataagattgtcattcagaaataccatactgtgaatgaccacaactgtgaagttaggaaagccctgtcaaagcaagagatggctagtgcttcatccagccaaagaggtcgaagtggttctggaaactttggtggtggtcgtggaggtggtttcagtgggaatgacaactttggtattggaggaaacttcagtggtcttggtggctttggtggcagtcgtggtggtggtggatatggtggcagtggggatggctgtaatggatttggtaatgatggaagcaattttggaggtggtggaagctacaatgattttggcaattacaacaatgagtcttcaaattttggacccatgaagggaggaaattttggaggcagaagctctggcccctgtggcaatggaggcctatactttgcaaaaccatgaaaccaaggtggctattggcagttccagcagcagcagtagctatggcagtggcagattttaattaggaaacaaagcttagcaggagaggagagccagagaaatgacagggaatctacaggttacgacagatttgtgaactcagccaagcacagtggtggcagggcctagctgctacaaagaagacatgttttagacaaatactcatgtgtatgggcaaaaatctcgaggactgtatttgtgactaactgtataacaggttattttagtttctgttctgtgggaagtgtaaagcattccagctaagggttttaatataggttttttttttgcacccatgctgttgattgctaaatgtaatagtctgatcatgacgctgaataaatgtcttttgttttaatgtgctgtgtaaagttagtttactctgaagctatcttggtaaatttccccaacagtgtgaagttagaattccttcagggtgatgccaagttctatttggaatttatatacaacctgcttgggtggagaagccattgtcttcagaaacctttgttgtagttgaactgatagttactgttgtgacctgaagagagcagttttagtagtgaaagtcctgcaggattcctagtggtcaagattggggagcatgcctgtatcccacagtggccagggcccaggacatatgcctggccctgtgactggctggtcatgggcacaggcccccgggagggaggggagagtcctttcagaagaaggggagggtatgggaacagacccaacctgaccgccccagaccgttactctccctgaggtggatggaatgcagaatcaaagtacaattatatggtttaaagttttaaaagtaaataacagaaaactaaaaataattatgccaaaatgataaaactttggaaggatgaagggaggaagcagaggtgcataatgaggccatttcttatgttccgtcacaggaggtagataaattttctccagatgaataaaaaaataagggtgcctatacatgctactaagcattgtggaggcgcccaccagaagtactaaaaatggaaatgtttacaagaagttgcctctggagagtgaggccaggactggggaggggagaggatagaaactgttttctctcaccataaacccttctctcatatttgatttgttcctatctgtttgttttacattgatcacaagatgtgctgtgagagtgaaagatttttaaatatttagatggatgtcctgagctttgatatgaaatgctgatctgatcaatatctaatatgataactccatttgggataaaattttagggtcatggggaaaaaacataatttggaatcatcttcattcatatgcaagttatgctttttaagaaggaaactccttgattctcatctgctgtgctgaatctttaggagtttaacctgctatgtcacatgtttcaataaaagagagatgttcccagcctgttaaacaacaaactcgcctgcttaaatcaaaaagcaattatgaatgaatgattgaactcttgtcatcaccctctctccaggagagagtaaggcacattcattctcacaagaagacctggcctcaccccatttctctgtttcccaggcatatggctcatctgcgtccagtgtatgtttggccaggacactggacatgtcccacttggctcctgcctcttgcccctgccagtctggcctacagccgtgggtctgaggggaggactgggagccatcagagacagcagctggccaggatctgatttggaggcctagtactcaatgcagagttactcttcaggccccagctccttcatgcagggctcctgggccacatattcagagtcagattccccacccttctccagggattcgggtcattgacttacaccaaagctggaagccataaatcaggagacttcattggtctcattcctgaacccacccctgcaacctttggtcatcgccccataggccagccctggccatccacccatctccctgatgctccctccatcctgctctgggactcctctccttcctgctcttccgccacggctgactctgcctcttcgtcactgttccactgggaggcccatttcagagcaaatgaaccctctgtgtcatcagcctttctctcctcccctgggggcatactcctttgccctagatgggggcttctcactctcccacttccaacttggctaaggacccagcaggacagggagcctcttcctcttcccctttgccctcctcccacatcccatcgtctttcgctctctggaggttggggggaggggcagggtggaacaattcccccagcttctcactcccagggcctcccctccatgatcaccgtctccctctcctccctgaggccggaggcctggccatgcccgtagggacaacgtctccccagcttggccttggtgctctgggacctccccaactgcacaacaggctcccaagccgggaatgcttttgtctcagctcccctctagacctggggagccctccatggaaaaccacagtcgaaaaatggatttagtatctgcattgttcagggtcatggcaagaaatggcattgaatgcttcaaatgatgagactttaatggcagtagtccttacagaagtgtggccaggtgaagaggatgaacagggatgttgagaagcacgaaaacaaacaactctaggatgctgttactcatggggctagacagagaggaatagtgttgccacagccagtaagagctagagatgtggagaaggggtttccagcaggagctgatgtcttggagagacacagccttggggaggggcagtggggacggggtggggggatacactgaccactctctctcttcctatacttttgccttccagctagagtctcccactggctaattccaacctctgcccagtcagtaagaaagcctgagaggcagcttaaagacgtcaggttcccagggtcaagcaggacacatggctgtgggggtggggaaggagagtgggcaaacaccctgaaactaaaaggagagtagcagtgcagaatccagggccactgaaaacagttcccagagtccaactccgtcgttttgcaaatggagaagccaaggctggaaaaggttagtgattttcccaagtcacacaaagttcgtggccaggctgagcccagaccccagatccccatcccccctgctgcctgtgacacaacaaaggccttgacaccaacactcccttctgtggagtcccttgtagtgtttatgcactaaaaatcatttttaaaacattttaatagggtatattgctttgaatcccttccccaacaggaaatatgctggctggctggcagaaggctcagcagctgaccttgaactcccttgacctccccacatccaggctgagattttccatccaacggtattgccagagcccaagctgaatggaggaggctggaattaaacagtaatagccccttccagttatcgttctgtagccggcagctagataaatattcggaaaacatcggaggagaaatctaattgaattcaaacataataaattgaagccaactcactggatttatggtcatgtcttctggcatcttttaattttgcatcacactcatttggaggcaatcaaattagggcgctcattagcagccaagggaggggaggctggagccacactcactgcggtaatgagatctctgcagtgggatgattcagaagtcggttgccggggaggctgcaagggcacagtggtcactgcctcctttcaggaaagttgttgggaggagcaggaggttgattgtaggagggagcaagggtggagtccagcccagctactcaccgggtaactgtggccttcaccgcccacagtgtcagactcctcctcggtgggatagcggcagtgcctgcctccgaaggctaaatgagtaggaaatgagataagaggtagaaaccatgtcttcctccagccctcagagtttgataacctctgccctctcatcccattacggccccatggacaaagctccttggcccccgattctcactcatggacctctggcttgtacatgtgagaaacaaacttacccgtccaaacccaaagaatggactcagatacccagagaacagcgaaagtgaaacttttaatgatgaacttgcaagatcgggtgtctgatggacaagcacacccagcagtttcgacaagcagtttatccctagagtacgggtccctcccccagttgctcatagactgagtactatggggtcacaattttcccggatgttgcctattgattgttaggtaggggctttaggtgtttttttttagggttgtcttgctgcattttgttgcagctcacaatgcattgcaatcctagtcagctcaggggctcttcaagtgtttgacttatgacctaagtagctaggcaggctgacaagaagagacaaatcaagctatcttgcagactaataaacttttatctaaacttctttggttcgggtgagggcaactaagggggtggggaagagggaagaagggggaggccgacaagcaggcagcagctatccaagcaggggcctagtatgtcctgttgcttctatagtttgctgacctaagccgattcaaggcacttggtcttggaaatggaccactgtatacattatttccttcagacacccaccgtggacacaatgctcagctcatcctggcagcctggcgagatatggccttgccgctagagccgttccaggcatccctaccccagaccaggggactggtccaagagacctgagctggaacctgagaaggacatccaggcagcagccaaataggtgcctggtgcaaacaggtgttcaggaaacacgggctttctcatccaccccagtccctgcacagggccgaggaggaggagggcaggcagctttcttgtctggcacaatcattcacttatcgaatacctcatatgcctgtggtgccaggcggggtgcagaatgttatcccattccatcctcactgaccataagggaagtatgaacacgtttcactttgtagatgaggaaactgagtcccagtgagaataggcatttgctcatggccacacagcaggtaagagatggagtcagcagtcaaacccaggtctgactgactccagagcctgcgcactctctgacaagcagctccacagaaccgtggctgcccaagcaggtgactccacaaagagcctggagcctctgggacctggacagggaagtagattgcagccttgtgagagttacatcatgtgatgagggctttctgatcccacagtctacagagggaaccacagctggagctgagcaaagccagctcatccaggcaggggctccagtgagtgcgccctgctgctcgccaggtggtcagccttccagcttccccagggactacctacatgtccccccaatgcttactgcccactcccaggaggggctgcgtgtcagagcaggccagagcaccagatgccctgtaagggtgtgtctctgtgtgtttgtgtatgtgagtgtgcacacacatgcatgtggaaatgtgcgtgggtgtgtatacacttgtgtgcatgcacaggactgtgtgtgcttataagtgtgtgtctctgtgagtgtgtgagagtgtgtgtgtgtaagtgtgtgaggtaggccaagcaattccaatcacttgttttctgaaatgtcctcagatccacccaggtgaaaggagctgataaatatgtcattataatcacattttctactgttaaaatacagtcctgattatatttgcaatgacgacagtttactttacccaacacagtaggtgattcaattaaacctctccccatctatccttgggcagccagacaggccagcctttccagccacagggagaagagaaggcaaaggtgacactcccatggccgcgtactctctcatcacattcttgatgcttcccctgtcttggttttttgaggcccccagggcttggccaggtgtctgctcattaacatattaggcctgagttcaaatcatgagccccatgagcagaaatgcactccaggccccctccccactccacagagcagtgcacctgaagcacagacctgactgagtgaagaaagtcttgacagtaaccacctgatgttagcacagatgccacagacttagggccctgcaggatgccagctgcattcccagtgcacccacacttccaatcactggctaccaagatagaggctcccactcagggcttcaagttgaataaataattcattagaatgactcaccaacctctgcacttacaattccagttttattgattggtacaaatcaggacaagctaaatgaaaagatgcacagggagaggtttggggagattcccaaatgtgaagcctcccagaacacggttatatgattaccaaccagggtggctgcactgagctacaatgtccagagtttttattggggtttgttacctaggcatgattgatgaaatcattgcttacacctttgtactcaattccaatacccactctctccccagaggtcaggctgatatcatgtggctcaaagtcctgaccctttattcacatggctggtcttgccatggttggccagcctgcatcctgaagctatggagtcccaccttgaagcacctggtcagcataaactccggtgtggccccagggacccacgatgaatagcaaagacactcctgccaccctgaaaatgccaagctcccttccaggaacctgggacaaagcccaaatgcttcattttacaacaccatgggccccctaaagtgtctggtggctcttcattgccttctgggtaaatccaggcttcagccttgcctagaaagccccttcctccttgtctgccctcatctcccagctctctggccaggtgccttttgttccagccacactggccttcttcactttccagacataccaggtcctttcccatacctttggggtgatatcctccccatcctttcccctttcttaatgcttccactgtcttgacatatgtgacatctgctcacctcttcatctccctaatgaggctatgagcacccaaaggcaccctcaaggcccacacattttagctgtcctggaagacctgaagccacacagtgcaagttctgcagagactgtgccattcagaatccctgaggcccttggctgggagccatattagtggtccttccctggcctacagagaggctgcaccattctcgagtcctaagcatggcatggccacagtacttgcattcacctttatctctgatcatgaagttgagcaagcagctgactcaagggccaatgatcctgccaaggtcttcctacaggtgttcccagcaggcctgctagccaggggtgtggcgccacaggtgcttatcatgggcccactgcaggatggctggtccccaagcagccccacccagagaagcttccaccatgatcctgaggcaatgcctaaggcctctggagaatgaggtgactatcactgttgggggggcatgatcaacacagggtgcaagtcagtttcttgggtgcttacaatgttcaattattgaatctgagtgcgggtgacatggttcccttggcaaagattaatcgaaccatataattataatttgtatatttttgtatatgtctgttcacttcagtaaaaatttacgtaaaatgtactattacaaaaaaagctactcttgccccagcttcttagcatatgcataaagcaatgctcagaaagcatcttactgatcatgagagttcccccaaggtgtttataattggttctcagagaaatgctggctccctccttctgtccccttagctgaagcaggctgtgcatgatacagccagaggagggaggccatcagtgttctgccagagttatttgaatttaagcccctgcactctagaattcttgaggctacccaaagcttcatggagctcatgatgagattcaaggtgcagattcctattttggcatctaaatcaagtgaggacacatttatgcaaggaccttaggcatccatatcagtcacaataaacagtttttgaaataattttaattattttcaaataatgcataataacctcaaaacctagtggcttaaaacaataatttgtcaccatctttcacagttgaaggagttggcttggctaagccaggcagttgttgtgtggggtctctccctgggttagtcagatggcgtctgagtcatccaaaggcccgacagggctggacatcccaagtggcttcctcacatagctggcagctgggaaccgagtgagggctgtggtctgcaggcctaggcacagctcctccatgtggcttgggccttctcacagcatggcatctggatcagaaaggcaggaagtggaagctgacagcctcttagccctgagcttagaagcgggcacagcaccatatgcctcactctatgggtcagagaagtcatagagctcacctagattccaggggatgggacagagaccccacctctcaaggtgagctctctaactgggaaatccgtgaccatgactttgaagtgaggttggatccaggagtccaagcaaggtcctgaactttccctccccgtctctggcctctgcagggctctgttgggctccagcttcagacacagtctccccaggagacagctatggtgctcagcaggtccaagctcagactccttagagcacatgccgaaggagagacaactgctctcccagcactcagtttcctaacaatggaccctagttggccctgctgtccacgtgctgatcccaacctaataagcacatccaatgtgtgacacactctggccaatgtgggtcctctgactgcccttgtggtgggcagtggggggctctctttattattacccccaccacaatcacatagaaagtttgtaaagaggattccttttctcaaagcagggaaccacagagctcatactgtaccccaagtcccctgcaacgttacctacaggtcatgcaaccagcattaagttacaaagagaaaggtgggtacatctggaactccctaggcctccttttccagtctctacctcgggatgtccagctgtcactccacccccatgttctccccctaccctctgggcctccaaggccacctacctcccagcctttcctgcctccttctccagaaggccaactgcttccactggccacttcagatgggctcatcccccggccctcccccagccctcacccttctcttgagttctgacaggataacatcgttgatatgatttggctgtgtccccacccaaaacctcatcttgaattacgatccccataatccctacgtgttaaagttaggactagatagatggaggtaattggataatgggggcggtttcccccatgctgttctcatgatagtgagtgagtctcgtgagatctgatggctttataagtgcccagcatttctcctgctaacactcattctctctcctgctgccctgtgaagaactgtgagtctattaaacctcttttctttagaaattacccagtcttgggtgtttcttcatagcagcatgaaaaaggactaatacaactggcttctagggttagccggggagtacctccggcatagactgggggccacatggactcaacatcagaccacaggcctgttagaggaggaggcgaagccatcagtggaaggcacacgagggatctgagtccttttcctccctgcctgtctgtggcccagggagccagtggtggagatgacacttttttttttttgagacagaacctcactctatcttccaggctggagtgcagtggctcgatctcggctgactgcaacctccacctcccaggtttaaatgattttcctgcctcagcctcccacatagctgggattacaggcgtgcaccacctcatctggctaatttttgtatttttagtggagacggggttttgccatgttgcccaggcttgtctcaaactcctgatttcaagtgctctgccggcctcggcttcccaaagtgttgggattacaggcatgaaccaccacgccgagctggagatgccacttctaaggtgtccttaggtttcagaggccatgcaggcgaatggagggacagtcatggtgttctgtcttttgttatggaatagttattattaaaatcctggagtgggttgaattgtggcccccacaaaaggttggtctgggtccaaactcctggatcctgtgactataaccttatttggataaaacggctttgtagatgtaattaaattaaggatcttcgggtaagttcatcctgactttgccatttttaattaagttgtttgtcttcttattattgaattgcaggagtaatttttacatttttgataccagtactttgttagatataagtttgagtactcagtccttgtaagagacagaaaaggagagacacacacagaggagaaggctatgggaggctggaggcagagatcagagccacgagccaagcttggagctactggaagcaggaaagcaaagaagaaccttgcctggagcctaagtagggagcacagccctgtgacactgtgatttcggacttctgacttccagaaccgtgagataataaatttctgttcttttaaaccatgaagtttgtggcaatttgttacggcagccctaagaaaataatacaaatcttctttcactgtcaaaagtgcctgggttggaatctattgtaaggactcccagagcgctctcgggaaaggaaacaagaagccggtcccctaggcctgggcctgactgaggccgggaccagaggctcaggtggggccctggaggccagcaggaggtcccagcccagtcaccagtacaggagattgacaggaatgaaagaaaatgttttgaggggtgtgccttaggtcacgggtccccagcagccagcagcatccggaggctagctggggtcctgggtcctggccatctctagtcctcagagacacaactgacgtgtgtgttggtccatcctcaggctcacagccctgaaatctctctcctctgagacagaaaaggaagttcatgtcagaatcggagcacagagagatcatgaataagctgatgtcagtggcccactcactgccaaccttgctcagctctgagcatgattatacccaatcaaagcctggaaaatcaatgaatctgcagcccaggatactgggtactacatccacagcccaaagagcctctccggggaaggttgctgagatactaagggaaggatactttggaaagatggagaagtaaaaatatttcctacatcctttgttttggagagactatacctgtatctgggatgcacaggtgagttcaaacaccaaggcgtttgtggatggtgcccaggctatactcgaagcagagccgtctccttccctgagtgccctgctcctgaatgaccaactgcaggaggtggtgtcaggccctgggctgtgcgaggaagggaaggtaagacgcagtgagccagggaaggacacaggacagggctcattgaagccctaccctacagtgatacaaaactgctgcacaagctggtccccagagagcaacagaggaagacttaggaggcagagagactgggaacgccagtggggatgggagggaagtctccagcctgaaaaagaaaatggccaatggaagaaactaggaaataaaacatggttgcgagtagggtattccctacttcttcgtatgagtctgggttctaggaggtgaatatgcatacagtcacatgctgtgtgacacttcagtcaactacagacggtgatcccattaaattataatggagctgaaagaatcttatcgcctggcaacaacctagtgcaatgtattatttaggtgtttgtggtgatgctggtgtaaacaaacctgcactgccagttgtataaaatctagcacatagaattatgtacagtgcatagtacttgacaatgataacaaatgactgttagcagtttatgtatttactatactatactttcatgattattttacaatgcactccttctacttattaaaaagaaaaagttaatgtaacacatcctcaggcaggttcttcaggagggattccagaacaaggcactctcatcacaggagatgacagctccatgtgcatgacggccccagaagaccatctggtaggacaagatgtggaggtggaacgcagtgatattgataatcctgaccctgggtaggtgtgggctaatgtgtgtgtcttcattttaatttttttctaatttaaaatgtaaaaaaagaaaaaaagcttataggataaggatataaagaaagaaaatatttttgtacagttatacaacgtgtgtcttaagctaagtattaatataaaaaagtcaaaaagttaaaaaaataaagttgataacataaagaagctaaggttcatttattattgaaggaagaaaaaaatttaaaatacatttagtgtagcctaagtttatagtgtttataaaatctgtaatagtgtacaatgatgtcctgggacttcacattcactcaccactcactcactagctcatccagagcaatttccagacctgcaagcttcattcatggtagatgccccacagaggtgcactactttttgtcttctatgctgtattttcactctacccttcctatgtttagctatgtttggatatacaaatattaccatgttacagttgcctgcagtattcagtacagtcacatgctgcacagattggtagcctaggagcaacaggctatgccatagagcccaggtatgtaatgggctgtaccatttaggtttgtgtaagtacactctatgatgttcacacaatgacaaaatcccctaatgatgtgtttctgagaacgcatcactgtcattgagcatcgttgtgtattaatccattttcaagctgctgatagagacatacccaagactgggcaatttacaaaaaaaaaaaaaaagatttaatggacttacagttccaggtggctggggaggcctcacaatcacggcgggaggcaaggaggagcaagtcgcgtcttacatggttagcagcaggcaaagagagagcttgtgcaagggaactcccccttataataccatcacatctcatgaggtttattcactatcatgagaacagcacagtaaagatctgcccccatgattccattgccctccactgggtccctcccacaacacatgggaattcaagatgagatttgggtggggacacagccaaactataccaccatgactgtagtctcttgtgtgggctcctttcactcatcataatgtttctgggctccattctccttgtcatgtgtatctgtaatctctcctgctttaatgttgggtagtgttccattctgcagcaatatcacaatttgcttatccattctactgtctggggtttttccccagtttgaggctactaaaattgttataaatatttgtttataagtccttgtgaacacaggtgtttttattcctcttgaataaataaatacctaggagaggaatttctgttttttttttatttttatgggtacatagtaggtgtatatatttatggagtacatgaggtgttttgatacaggcatgcaatgcgtaataatcacatcagggtaaacaaggtatccatcacctcaagcatttatcatttctttgtgatacaaaaattccaattatacacgcttacttatttttaaatatactaaaaattattgttgactggccaacctgttgtgctatcaaatactgcatcttattcattgtatttaactctacttttgtacccattaaccatctccatttcccaccctccacacccacaaccttttcccagctctggtgaccatcattccactctctatctccatgagttcaatatttttaatttttagctcccacaaatgagtaagaacatgcaaaatttgtgtttctgtgccttttttatttcatttaacattatgtcctctaattccatccatgttgttgtaaatgacaggatcttattcttttttatggctgaatcgtactccatcgtatatatgtaccacagtttctttatccatttgtctattgttgaacaattagagtgatttcaaatcttggctattgtgaatagtgttgcaataaacatggaagtgcagctgtctctttgatatactaatttcctttcttttgggtatttacctaccagtaggattgctggatcatagggtagttctattttcagttgtttggggaacctccatactgttcatcctagtggctgtattaatttacattcccaccaacagtgtataagggttcacttttctccacatcctcaccaacatttgttattgcctttcttggataaaagccactttaaccgggttgacatgagatcccattgtagttttgatttgcatatctctgacaatcaatgatgttgagcaccttttcatatgcctatgtgtcatttgtatgacctcttttgagaagcgtctattcagatattttacccatttttaattatattattagatttcttcctatttagttgtttgagctttgcatagattctggttattgatcagatgggtagtttgcaaatattttctcccattctgtaggctgtctcttcactttgtcatttcctttgctgtgcagctttttaacttgatgtggaaatttctggtttgtatagtaagtatatatttaaattcataagaaacttccaaactgtttttcgaagtgacagcattaatcctgaatttccactaacattgtacaagagttctagttgctcccgattcttacaaaaattcagaattgttgatctttaagttcaggcatcctcatggtgtgaggggtcgtcacatttccctgatgtgtaatgctgcagtgcatctttttatgtgtttattggttgtttcgggaagtgtttgctcaaaattttctgcccattttgataaagttgttttgtcttcttcttactgatcttccagggttctttttaatttttgcataccattactttgccaaatacctgtgtatattttctcctggtctgcaacttgccctttcattttcttcatggtgtcttttgtagaccaaaaacttttaatttcaataaggcccatttatcaatttttttcctcgaaaattttatgtgccctgagaaatctttgcctgcccaagttgtgaagattttctcttatgtttttctctagaagctttacaaatttagcttttatttttgtctgtgatacatttcaagttatggtataggtaagggttgaagttcacttttttcatgtatagatcttcacttgttttagcaccatttattcaaagactatctttttccccatcaaattactttggtaactttgttaggaatcaacatattatgtatgtccagaaacaggacatctgattctgttccactgacgaattgtctaaactgaaacctataccacatgtcttcattactcgctttcctgtaatcttgaaataaagtagataagtcctcaacattcattctttgtaaaaattgctttgattattctagattatttgtacttccatgtagattttggaatcgctttgtcaatttcaaccaaaaatcaggagagctgacttcttaacaatattggcaattcactttgtctccacaatgtttcatagttttttacacagagattttgctcatcttgtaagtattttcaaatggtactatagacagtattatttatataatttaatcttccaaattgccacaatttaggaaaacaactgatcttttgtttactgaccattgtatcttatgaccttgctaaattcgcttattttagtaactttttgtaaattccttaggattttaaagtacattattatttcttctatgaatggattcagttttacctcctcctttcgaatcttatgtcggtatttcctcttaccttattgcaccacctaggacttttggtacaatgttgaatgatcatggcaaaagtggacattcctgcctcactcccaacctgaggaggaaaacattatgtctttcactatcaaatttgataatacctgtaggtttttcatgacagcattttttcaggttgatgaatttcccttctacgccagtgttttaagaggattttatttttttaaaaaaaagtacatcgtgaatgagtattgcatattgtcaaatgcttttataacatctatctagatcatcacctgggttttctgctttaaactgctagaattgcattcattgattggtcaattgcactgattaactttgcatttctaggataagcactcttggtcatagtgtattaccctctacatatattcctagattcaacatactgaaatattttaaggatgtttgcatgtatattcctttttttttttttttttttttttttggagacagagtcttgctctgtctcccagcctggagtgcagtggtacgatctcagctcactgcaacctccacctcccaggttcaagtgattctcctgcctcagcttcctgagtagcggggattacatgcgtacaccaccacacccagctaattttttgtatttttagtagagatggggtttcaccatgttgcccaggctggtcttgaactcctggcctcaagtgatccacccagctcagcctctcaaagtgctgggattacaggcgtgagcatggtgcccagctgcatgtatattccttgtggacattggcctataagatttttttcttgtagtatcttttctctgagtttgatatcaggattatgctgatcccataaattaagttagaaagtctttcctcctcctttactttctgcaagtttgtataaaagtgatactactacttccttaaatatttgattgaattcactagagaagtcactggagcccggaattttccttgtgtgaaggtttttaattacaaagttaatttctttaacggttataaagctattcagattatctattttttcttcactgggctttagtaatttttcttttgaaaaattttcccatttcctctgggttgtcaaatttgttgccgtaaagcttctataatatccccatattatttctttaatctctacatagtctgtaatttttattccctcttttattagtgatgttggtagtttgttttatgactttttattaggagtttatcaattttattgatcttttcaaagaactttttatcttattgactttctttattattcctttttctattacattgttttctgctattaacttgatttcctttcttctacttacattaggtttaattggctcctctttttccaacttctaaaagtaaagcttaaatcattgaccttggactttttatattttctaataaaaatcatttaaagttataaatttgtctctaatcattacaaaaattttgatagtctgtgttctaattcttatttaggaaaaattattttaaaatatcttttgtgattttctctttgatccatgtattatttaaaagcatgttgctcagtttccaaatacttggggattttctagatatccttctgctattaacttctattttagttccactgaatttagataacatgttctatattattttggtcctcttaaatgtataaagttgttttctgccccagatatggtccattataatgaaagttttgtgttcagttggaaacaatgtggattctatgaatatggtgaattgcgttgattgatttattgcgctgttgattaaactgactttgcattcctaggatatagaacactacacctaaaaatctgtatttaggtagaaggttctataggcatcaattaaatcaagttggttagtagtattgttcaagtgtccttcccctttattcattttttctacttgttctataagttactgagaaacaagtatgacaatttgtaaatataagtgtagatttctctacttcccccttcatttctgtccatttctttgtcatattttgaagttctattattaggtgaatatatgtttacaatttttctctttctgataaatttatcattatgaaatgttctcgtttatttcttgttctgcatatttcttgttctgaagtttactttttctgatatttaactagcccctccaactttgttataattggtgctacatggtatatttttttccatcctcttacttttgacctacctgtgcctttaaattattgaggtcttcagacaacatagagttgagtcttgccttattatacagtctaaaaatatttgtctttttattggaatttttagaccattttcattttatataattatcagtatagttgggtataaatctaccatttgtcatttgttctctgtttatttcatctgttcttcatcctttatttctcttttcttgatttcttttagaggaattaaaaatgtttatggttctattttatctccactgtgagttcattagctataactctggcttcatgtttagtggttgcatgagggtatacaatatgtatcattagctcattacaaatatactattataacactttatgtacaatgtaagaccttacaaccatatacttctgtttcctccattctgtccatcatgctatcattacatattttgctttaatatgttataagccacacagtacgttgttattatttttgtttaaacaatcaattatcttttaaggaaatttaaaaatgagaaaagcctttgtatttacccacatacttaccattaagtgtttttcatcctttgtccacttagtatcacttcacattagaaacacctggtgagtcttattatatttgttagtgtgaggaaaataattgaaagtatacacagttacccagctccttgtctcttataaggggttgattaggagtatccagtggtgatatctttattgctagatcatgccatggactattagtgctctctttacaattggaaataaagttattagcaacttaaagtgtaatcagattagagacccaattttggaatagatagatatgattatacttaaatataatatataactatatataattttgtacatatgcataacgtgtgtgtgtgtgtgtgtgtgtgtaaggaattggctcctatgattattgaggctgacaagtcccaaaatctgcagttagtaagctggaaacagcagagccaatggtgtacttccagttcaaaggctggcaggctcaagactcataaaaagctgatacttcagttcaaaaatggcaggaaaaaaaaaaccacctcccagctcaaagcagtcaggcaggatgaaattctctcttacttgcaggagagtcagtctgtctgttctattcagatcttcaatagatttgatgaagcccacccacatttcttagccactggcatttagcaattggattatgttttaccttgcatagttttctttgtgcttatcttgcttttgatctattgagcatcatggatgggtggttttgtatgtttcatcaaatttggagcattttttaccattatttcttcaaatattttttctcttccctctttcctttccttctcagcttccaattacaagtatgtgatccatatacttgcatgaatattttcccacaggttactaaagattcatttaaattttctttttagtctcttttgactgaattttagttttgaaagtttctattgcaactttcaagttcactgatcttttcttcttcacgtctaatctgttcatttcataaagaaatttttttatttaagatttttatttttggcccttgtatttcctttttaatttttctccttctttgatgattactttcatgtttcctttaaattcgtgtgtatatctgtaattggtgttttcaatcctttgtgtgctatttccaacatccatcattcctgagtgtgtttctattgactggtttttctcttggtaggagttgcacttctgtgcatctttacatgtctgtatttcttatatgacaccaaacattgttaattataccttacttaatgctagattttgttgtcctcctctaaagattggtagatatttttctggcagccagctgagttacttagaaattaccctgacccttttgaggtttgttttgaagctttgactgaaggaaaggggttagattagactttatttagggcttctttactcctcctgccaagacatgacttttctgggatctcaactgaacgcaccagattttctacaaggacgctccactctggctggtaggaatgcaggggtcccccccatgtcccacatgagctctgaaagtgcctgctcactgctttccaatcaccctttgcccagcctcctggagtttcatgatagacatccacaacctaatttttataacagatccatggggaaccctgttgtactaatctgttctcacactgctataaagaatgacctgagactgggtaatttatgagttaaagaggtttagttgactcacagttccacaggctgtacaggaagcatggttggggaagcctcagaaaacttaaaatcatggaagaaggggaagagaaagcaaacacatccttcacatggcggagcaggaggggaagtggtaatctcatgagaactcactcactatcacaagaacagcaagggggaaatctgcccccatgatctaatcatctccccccaggcctctcctccaacactaaagaccacaattcaacaggagatttgggtagggacatagagccaagccatatcaactgtacagatttctggatatttttctgtacattactccctcctctcaaaactgctgcattggggattaagtttccaacacataaactttgtgggacacatgcaaccatagcaattcccttccagggaggttctgcaaagaggcctgccactgattcctcattgcatggagatgagatctcccttattctgcaaggccatgtggtttttccatctctttctaatctgagtgttcaggtaaaagtccatacctgctaacaggggcaagcaggtgctaaaaactagtgaaaaaactagtgaagagggcccaactaactgaagagtagcatgcccacccaaagggtcagctgtgaccaagatcccacaaaggtagccatgcacaaatgcaggccagggctgcttgacttcagattcttcaaaagaagctgcaagtcacaatttttacatgaaatgtcctgtgtgttaaaagttagcaactgtgggccaggctcggtggctcatgcccgttatcccagcactttgggaagccgaggagggtggatcacaaggtcaggagttcaagaccaacctggccaatatggtgaaaccctgtctctactaaaaatacaaaaattagctgggcttggtggcacatgcctgtaatctcagctactcggaaggctgaggcaggagaattgcctgaacccgggaggcggaggttgcagtgagctgaagtcatgccactgcactccagcctaggtgaaaaagggagactctgtctcaaaaaataaaaaaaaagttagcaactgtggaggacaaacaaaatgctgaccctgtcttcagacttctccttggatggaagggtggcagacccaaagcctttggcttaagaaatctccccagggccaggtcctaacaaaacgtggcttctcccatgatgtcccccatgtgtcaatgctaaaccgaccctctggctctgacaattcaaagtcaactcaacaaatgcttactaagcatttgctgcctgacaggctctggccttgatgttgggaataagactggaccggtcactcatatctctgccctcagagatgtgacctcagagattaaacctctagtgtttactagaggttaaacactagtgaggaggcagatattagcccaaccatcgcaagaatacatgactacaaactgagataaatattaggaagaaaaattggaggaaactaagagagtttattacagcagattttactggctatgatatttgaactgaatgttgaaggatggatagcattcaaataattaaagagattggatgagattgagagtaaagctttccataaagtgagcacagtacgtgcaaaggccctgaggcagagcagagtgtaggcattctacaaactcaaaggccagtgtggctggagtgcagggagaaagagagaaagtgcacacaggtcttctaacacctaaaaaaaatgtgttagccacctcgttttccccagtgtagccagaaatgcattggtaaggaaagacccaggttaaagcaagcccgagtgtgtgaccaccctctgcatggtggctcctgtcctgctacccattccaggaggacacagcaaaaccaggggccacatctttgattctgtaacttgcatcacaggtcctccaaatacagctccttccccatcagtccctggatacttctaagttcatttcctgatcaatttccctctggcctatacatcttaaccattgaggatgttgtcttgctctcggcctggtccgtctgtgtttgccacttactgtgtgtcccctcagggcccagaccagagccacagacatgggctggacccctccctagtgggtgaagagccctggtgtcatcatccaggaagaggctgatcctcccaaggaaatgggaccagagggaggggaactcaggctgtccctctctggagctgacgtaggcccatcttcaccctggttttgacttgagtttagatttgtctgaggccaggaaggttagtgaggcagcagcgggtgggcaaagagacccttacccagtgaagacaactggggtgaggccgcctcagggtaaggccctctgaagaggagaggggttttcccgtgagcccataacatcgagtcacctgctgcctcctgattcagtcaacattgctgagtgtctgcagctgagcccactctctgtgctggcactggaatcctaggtgacaaaatgcccaggccctgttctgaggaagcagatgcccctgaggaagtggacaacagtccagcaaccccatgtggcagtggaagcacaagtgagggcatggctatgcccaggaattctctgaaccacaagagggtcgaactcagggcctgagccagtcttgggggtcagcaagagcatcccagagggagtgacatagaagctctccactccaggctagctgggagttgtaggccaggtggagtacattccaggcagaggaaactgcagatacaaaatcctgggagcaggagagagtgcagagagtttaaggaagaaagaagtcacatgaagcgagatggggctgcaggagaaggaacctgtacaaggacagactgaggagggttgaggggtgggggtgggtggggcccaggctgtcaggagatgtattagctcattctcacactgctaataaagacatatccaagactgggtaaaagaaaaaggtttaatcgactcacagttccacatggctggagaggcctctcaatcatggtggaaggtgaatgaggagcaaagtcacatcctacatggtggcaggcaaaagagagcatgtgcaggggaacttctctttataaaatcatcagatctcatgagacttattcagcatcacgagaacagtatgggaaagacctgcccccatgatacaattacctcccaccaggcccctcccacgacatgtgggaattatgggagctatcattcaagatgacatttggatggagacacagccaaaccatatcaggagattagatgggccctttcagcacagtctgtcctagacaaagagacttaaggaagactcagggccccccttgggtgtggacattcacttgggagcagagtccggaagccagcatgatgcggggggaggatgctctagattgacggtgtttacccaaagtgcatgtgctgaaatcctaaacctcaaggtgatgctattaggaggctgggttgtgcaggggtgattaggtcccttataaaagaccctggagagatccctcaccccttctgccataggaggacacagcaagaaggcgccatctatgaaagagtaagaggccctcaccagaaaccaaatctgtttcagctacttgatcctggacttcccagcctccagaactgtaagaaataaacttatgttgtccacgtgccacgtggtgtatggcattctgcaatagcggcccgagccaactaagaaagtggggagccatggtgagtgagtgcccaggagccaggagtgtctgccccaggggctgcaggttcaggcactgctccacggggaggcctccactccttgccagttttggcagatccaggcttggggctacagagcagcctgccagactgccccggaccaggcaggagcacacctgccacatgagaactgagcaaggatgatgcagttgcagcccacatccaaagccctccttccaacacaccaagctgcaccccacagccattttgtggttcaaggtacaactcacattttcaggaacagagggcaaggcctggggatctactgccttactatagagagaaatctgcttccaatgccccacctgtagcccaaagccctcctaccaggacaccccaaaagttgtgtcatagctgtgctgcaggcctcagtgactcggctcaggatgaacacaggagggctggaacagaccatccctgctcctccctccttcccccactccccgccccatgagtagccctggccttctgccaagggtctggcagggcccaggaagggagggtgcccttcttttgttctgctaaagtcctggggtttctcccccatggtgtctgactgcccaacctccacgcgagcatttggaggcagggggcactttgacccactttgctcatcccagcctcctacaaatggcctcctggtcatcaagtgtggaggaaatcacacttggagcccaactgggagccccaaattcggctccagcttgctcttgacatggggcagggaaaagcaaggtggtatgaggtgcccaggcagggagacggggagcctcaggtctttctctcggccggcctccaaggaccgtcagacttctgagtctggtttctcatctctaacttgagatgcctgaactatacagacccctatcctaacactctgaatgaaacaatgtgtgatcccaagtccaaaaccttcaaggttgggatccttaaatgacactgagcaaacccactgaggagtttttccaggtgctggggttaccccgagggttcgcctggcatctccctctaccaggacgtgcagaatgactggatgtttgagtgggaagggcatgagagtgcatgtcatagggaaggaagctgtggcccagggtccccaggctgcctggctccccactaaaggctccctctgccttagcaattggcctcctgccgcctgtaggcttagcaccatctcagcgacagcgataacacctggagtgaacaggcctcctgcaaactttatgttgccctggagataacagaccgttcagacagactcaaacacttccagccaaggcagaggagtaggtccccagcaacagcaggactcatttgcttttagagataatgttgctgaggctgattgaactgtgctccagtctcttgtccaaacacgtgtatttctcatctcttaaccatgactgcatgtttggagataacacctactcaggagccttggcaactagatcagccagcaatctgtgggagaaaagtggactgccactaagtgtcaccagacagaatgccatcccttcagaacacagctgtctgctccaaaccctgtacctctcacaccagctggtgggggagcaggtgaagcagcacagcattgcaggaaagcaattttgcaaaaggtgtcagaggcttagaagcttgcatctcctgcttccccttcattttgttttgggtagctctcttacaggaatgactcaaaccagcctccactgacagaacaccaagaactcaggggaccctacaaagcttcctggacaggcttttcacctattcataaggaattttaaatttaaggaatataaaaagtacaaacaaaaatgttactacaatcccatgatcactggggtatttccctccaggggtgttgcttctgtgaatgtataagtgcatttccaaataatgaggtgcttactctgcggcttagcaactgattttaaaatatttaatagatagcaagcttttctcagtgctgttaaaaagtagcctgtcttgtcaagccttctctgattgctggacattctattgtttcttatctttcactacatgatacagcacacagaaaggcattttgtacagaaatcttacaatcaaatatagactcccctgtcagctctgagcttctccacatgccttttccttctgagtagtgctgcttccagttgccatgggcctggcccatagtaggtggtgttggataatgcttcccaaattaccctgcttcactgatgacaaacatagtggcttccctctcattgtgaagtgagtaaatgcatgtatctggcacagcataagaactgaagaaaatgccagctgttttttttttctttttttgagacagagtctctgtcccccaggctggagtgccgtgaagcaatcttggctgactgcagagggttcaagcaatcctggtgcctcagcctcccgagtgctgggactcgaggcacatgccaccacgcctggctaatttttgtatttttagcagaggcggggtttcaccatgttggccaggctgatctcaaactcctgacctcaagtgatccatctaccttggcctcccaaaatgctgggattacagacgtgagccaccacacccagctgaaaatgccagctttaataaagatgaagctaaggataaggaccatccccacgctcagagcagagcagggaagacaaagaaaaacaggtggttctaggtactggtcctctcggaggagggtacagcagcctgcttcttacctgaactgtgtttcttaaatatttctaaaaatactgccaggtgtctgcttacccctgtctgcagaaggaagtttgcatatttgcacaggaatataagcatttgttaattggtttctgtgttgatatatacaaatgttatagatccctgggtcaatagttctgcctggggaaaggtggaggaagtacaatcaggtgataaagtactgtgcccaagacgcagaacttgcttccaccggtgcccagagaattggcaggggaccatggtctgcctgactgcccctttccttctcactctccctcccttcctccctccctctttctctctctctccctctctttctctctttttattgagcttaatttgcaatatactgtcctgctttcttttcttttcttttttttttttgagatggaatctcactctgtcgcctaagctggagtgcagtggcatgatctcggctcactgcaacctcctccctccaaattcaagcatttctctgcctcagcttcccgagtagctgggattacagacgcccaccaccacgcctggctaattttttgtatttgtagtagagacggtgtttcaccatgttggccaggcaggtcttgaactcctgacctcatgatccaccctcctcggcctcccaaagtgctgggattacaggtgtgagccaccatgcccggcctgtcctgctttcttaaatagaggcagacaagccccattcccctaggccctaaagtctagtttccatgctttgtatggagagctatttttttcatgctgttgctggagccctctggagtcttgattggctgcatcgtggggaaggtgggctcgctggcctagcacctccctggtcccctgttggaggctagctcaccttcaagctccaatatctgttcttcatggtggaaaccaatttactgtcctctcagggggcattattctgggccaggcactgtgccagctgcccaggagataacaacctacaccctttgtttgccggggttacagccaggtgaaaagatggagactctcttgcatccttccagctctaagattccctaagtgcccaacaggaacaaggcaaagtgcaaaatccagggatgcagacacgaaacaagggagccaggaaaagttttcagagaaggtaaacttggaattggaaagcatgagattcggaaggcattgagctgggcacagtgtggcatatgtgaggacccaaaaataaggagtctgtggattcaagcatggggtgggagtgagggggtgctggaacaagcaggagaggaaggccagccagggggaagctgtgaatggccaggggccatgtgaaagcacggggaccccatcctgcagagggcaggaaccgctgagtgggagagtcaaggtcagatgtgagacgttgtccagagaaaggatcgctggacaaaaggcctggtggcagagatgtcattgagggaggttcttgacatagtccaagctaaaggaacaagtctgaatcagatgcccctaactaggcaattcagtggttcacaataggaataactgtgatggaaaatccagctggaatctgagaaggaccatattttgctttggacttgcacttgaggtatgtgtggaacatgccgtggaggcgtccagcctgcaggtagacggagactggagaaggtgtgagtctgggaacggggcacagttgcaattgcttatggagggtgttgggggcaggacacaaaagctacagcagaaccaggaaagcctggcatatgagggacagaggacctagctggagtcatgccatgggagctaagggaagaggagatttcagggaggtgatgtcaagaatgaagctgcaaagatcaagtattgcaaggacccaaatcgcatggcaagaccatgccacttgtgcttttttttttttttttttttgagacagagttttgctcttagtgcccaggctggagtgcaatggtgtgatctcggctcactgcaacctccgcctcctgggttcaagtgattctcctgcctcagcctcccaagtagctgggattacaggtgtccaccatcacactcagctaattttttatctttagtagagatgggcttttatgcagagcagtttcagcagtcacagaagtgaaaatgcctgtcagctgagaagcaaagagaaagtgagagtgtggtggccaggagtgtagaacactcttgtggggcttggctctgaggggaagaaggtccagaacaggggctggcaaagtcgtggggagtatttttcctaatgggggccttcgctgcagtttgtagctgcagtggcagagcctgtagaggaagagaggatgaagatgaccttgaggatgccatcctggaaggctggggaaccgtgatgtcattacttatgggataaactctccccagaggaggaatcctcacgtgctttgcatttgttccttcccccaggctcagacactttgacactccccagtcctgagtgtggggccagttcaggcaaggcaggagggaggaggaggcccagagccccgtggaaaattttcctagggaggcccaagcctgacactgggagacaggtcagcaacacaggacacagggctgcacccaggccagcacggggcccagagtggcaggctggcaacctgtgtccccctcaactcatctcacattttttctcaacagtttggacatttatggctttttatctagtaccatatgcccgtcgatgggagcaatgaggctgctggtctggcttttaatagcacagctcagatgtggacatggctaatactaacttagatgaggaaattaactggaagagccatggaatcaagcttggcctgtgtaggacagtcctcttaaaatgagattatgattttaacaaaaatcacgcagcacctgccatgtactggatattctactcggtcctgatgctggctttgctggcagatctctacttcattccatggagaggttggagggccttaaaattactctatttcccacaaagataaatcatagactcaaaaaataacagatgctggtaaggttgtagagaaaaaggaatgcttatacactgttgatgggagtgtaaattaattcaatcattgtggaaaacagtgaggtaattcccccaaagacctaaaaacggaactaccattcaacccagaaatcccactactgggtatatacgcaaaggaatataaatcgttctaccataaagacacatgcatgcacatgttcattgcatcactattcacaatagcaaagacatggaatcaacctaaatgcccatcaatggtagattggataaagaagatgtggtacatatacactatggaatactatgcagccataaaaaagaatgagatcatgtcctttacaggaacatgtcctttacaggaacatgatcttgttcttttttatggctgcatagtattccatagtgtaggctagagctggaggccattatccttagcaaattagcacaggaacagaaaacaaaataccacatgttctcacttataagtgggagctaaatgatgagagcccatgggcagaaagaggggaacgacagacactggggcctacttgagtatggagagtaggaggagggagaggatcagaaaaataactgttgggtactaggctcagtacctgagtgattaaataatctgtgcaacaaatccccatgacacaagtttacctatgtaacaaacctgcacatgtaccctgaaacctaaaataaaagattttaaaaaataaataaaaatgtttaagtaaaataaaaaataaattttaaaacttaaattaacttttaaaaaaaccatggactcttagaagagcacaaattcttgaaaatattctggttcaaacccttcatttgactactatggaatctgagactcaaagagagttagcgacttccagacctctctgtgtaggtggcagatccattgaactatcagaagacagctgccatcatccgacaaggcttctgtggggcccaggcacctctttcggacaagtgtggggcttggaccagagcccccatagcttctgggtggtggggggcaggcatgggtaatgcattgtagggggtgatctgggcggcgagaggaggactagaaggaggtggtaggcacagcaaacagaggcaactttcaacatccctcaaggtgcctgccttcctcagaactccgcctccctttagcaagctgaagagagtgagagcagcctccctttagcaagctgaagcaaaaggctttggaaatgatcttggggccgcaaactccttgagcaaacaagggaaaagtacttagcagcccatacacttcctgctagatcagagttcatcagggaaaatccacagagataatctcaggaacaagcgttctgacccttccagggcagcgcactgggacctagccgggctgatgtcagactccaggagagcgaccccggaccttgggcttatatgatcaaggaagcacagcccctggcctggtgggatcagagcttgatctgatcgtagtggggtatggcagaactctggccatcagcccttctcttccagctcaagggggaggcaggtggggttgcagggagcagcagccccactccagcatgatcaggagctggggttccagtctatgacacagcagcatcctaccagtgttgatcatcttcagattcagccaaaaccagcttccttggagctctgcaggagacgaactttgtgaggccagcctgccgagaatagggaaaccaggaatcggctgaagtttggcagtggcttacaaaactaaacacaccattgccatacaatccagcaaaagtactccttgatatttacccaaaggagttgaaagcttatgttcacataaaaacctgcacatggatgtttacagcagtagctttattcatcattgccaaaacttggaagcaaccaagatgtcctcgagtaggtgagtggataaataaattttggcacatccagacaatggaatatcactcagctctaaaaagaaatgagctgtcaagccatgaaaagaaatggaggaactttaaatgcttattattaagtgaaaaaagccaatatgaaagacaacatacagtattattccaactacatggctttccggaaaaggcaaaactacggggatggtaaaaagatcggtggttgccagggtttaacaggaaaggaggtgataaataggtaagacacggaggatttttagggccatgaaactattctgtgtgatactataatggtggttacgtgtcatgatgcatttgtccaaatccatagaatgtacaacaccaagagcaaaccccgaaccatggagtctggcatcaactgtaacaaacacaccactctagtggacagtgtagctaacggggaggctgtgcatgtttggggcccaggaaggatacgggaagtccttcttggccttccagaaactggactcctggcccatcttttcatctctttggagaaacaaacaacaaacaataatctcgtcataattaaaattcactgtgatataaagctactctaaaaatagtacaattaaaattaaaatttatttcatttcttgagctgacatttcagacagcccagtggcctcccactaaactcgaaggtaatgagtctctgctcagtctcacctcctgggcttctgttccagtgtgagtctgagctccattcaactcttcctgggccttttcagctctaggtgtaaaggttcagtgtgaactcgtagaaagaagacaggcttttcagtcaacagatctgaattcttataaggactgtctcatagtccttggtctcagtttccatatttgtacagtgaggatcatggtacagcgttagggctggacagaaagccctcagactggcttaggacagatggagtggtcatttgggttctttctactccatttcactgtgactataaagctgctctaaaaaatagtgagagtaaaacgaaaagattgatgttgattttcatactttaacccaatatatctaaaatattgctatttcaacatataatcaatatacaaaattattaatgagacacttcacattctttgtaggggctgtctttgaaattcaatgtgtaatttacacttggcacatctcaatttgtgccagttctatttcacgtgctcagaagtcacatgtggcccatggccaccacactggacagctatggtttcattgtccaaccccaccttggaacccaaatccttggaacccatgatcctcactgtacaaacatggaaactgagaccaaggactatgagacagtgcgtgtaagaattcagatctgttgactgaaaagcctgtcttctttctacgagttcacactgaacctttacacctagagctgaaaaggcccgggaagagttgaatggagctcagactcatgctggaacagaagcccgggaggtaagactgagcagagactcatcaccttcaagtttagtgggaggcccctggctgtctgaaatgtcagctcaagaaatgaaataaattttaattttaattgtactatttttagagtagctttatatcacagtgaattttaattatgacgagattattgtttgttgtttgtttctccaaagagatgaaaagatgggccaggagtccagtttctggaaggccaagaatcgaagtagtaagctgcagccgttttccagacaagcaggatgtggggatgcagaagaattcaggactggaggggcaaactccgtaagcaggggctgtcacgattcccatctccctctataaacctctctcttttcatgtcatactgttccatgttatatgtaactgttttaaagctacatactggacaaaaagtggaatagactccagcctctgaattgttaaataagctgatgacaaaccttcacattttctccatcaggatgtgactgaggccccactgccaaatggcagcatgctcagatagcacccaggaatttggggaaaaaaactggtgctcacagctgcccagttaaggcacaagtctcccgcctgctgcaggtatgtgggtgggacaagtgggtcagtccacagaacaaaaggtatgtaaaggaggccttctttttgggaaatcctttgtagatccaccacccacaccttagtcacaagcccagaaggggctgaaaatgacatttccaaggggcacaggctgccagccatcacaaagcacactatctggtgggggagatatggctatcgcagagttttcacccacgagctggagttctttgttctgaatgcatgccctgctttcagtatggtttccttggcagtcaaaaagatgctaatcaaatgccccattgatagctttatgaatgaaaggatgtgtattttaagagagctttttgccggcacccaattacactgataaacttttcgcagtctgacaggaattagtttcaaataagtggtgacatttaaacaacaacaaacctcaaggccatgattaagcagccacactctcaagcaccctcctgctccaccgatcattgtcaagtgcccttgcagatgcctgtttggctgcccaggctgggagtgctggctactgccggctaagcagacatcttgctctgctcctcggaccctttcccaatatctcctctggacctgggagccccattccggtctgtctgtatttgcaggggttgtgaggtgtatcagaaccttgaagagatactctgggaagaaaggccttcccagactgcctctccgcagtgctgtaagaatcagatttcttctatgggggacttccaggtctcttcagcattttctcagtcatcactgtatccctgccactcagtgaaccacagcaacaactcccagcttccagccgagaagcttgaccctgaagctggcctcgattctctacagaagtgaggccacagagcacaggtgaagggccacttacctggtatcatctctggtctcagctctggagaactagctcctctgccactgccacatcctgtccaccaagacctccttgctgaaccccacccccacccggtgcctcaggaccctaacttgtttgctgacctccatgtcctctcaccagatcaagccctggggagctgaacttcctctggcccactgccagctctggatcagtccacaccccagccagccacagcccagccctgcctctctctgtctctctctcatggctgggttggccttggccaatgctctctctagagatcaagacacaggcacctctcttggtctgttctggctgctgtgacaaaatgccttaagctgggtggcttataaaccacagaaatttatttctcactgttctggaggctgggaagtcctacagactggggtactggcctgcttgtttcctcatgagggctctcttcctgggttgcagatggacatctccctgatgtatcttcacatggcagagagagagagagagagagagagagacagaaagacagagaaagagagagagagagagagagagagagcatgctctttggtctcttctggtaagggcctaatcccgtcatgaagaatccccataacttcaactaaatctaatcacttctcaaaggctccatctccacataccatcccattgtgggttagggtttcaacataggaattctggaggcacacaaacgtgcagttcaaaacatgtggagacaagggggcaaggactagagagccctaccatcctcgttcaaacccttgaatcaagcctgaagtcaaagaacttcctttggagagccccattccatgagccgataagttccccattttgccatcacccacttgagtttgggattttcccccagttactgagtgcctgactgacatgatgccccccacagatgggcctccctgcccccaatctcacctcctctgttagtttcctggggttgccacaacaaagcgttacaggcagagcggctaaaatgacagaaacttatggtctcacagttctggaggctgcaagttcaaggtcaaggtgtcagcagggttggttccttcggaaggctgtgcaggagcctgttgggtgcctgtccctcagcttctagtggattacttccatcttcagcatgccttggcttgtagaaggactaccctgaactctgccttcatggtcacaacacatcctccctgtgtgtgtttctgtgtccaaatttccccttcttataaggacaccagtcttatacggacaatgctcaatgtatgaacctttgccaagggattggattagggacccactatattccagtatgacctcatcttaactaattatacctgcaatgacactgcttccaaagaaggccacatgatgaggtaccgttggttaggaattcaatatatgagtttggggggacacagttcagcccacaccacctcctctgaccctgaattggatgctgtttctgctctgcttatgatcctcttgtcctcactggcctcttggtccagcacccactgaggcaccagctctgagagagctcactggcttcacacaggtgcgacctgatggcgcctcacctcataccccaaacatccttctcatctctgcaggacctgctctgtttatgtccaggtatgttcagtgttcctgtgtgtccccagagtgtggggaggtaatgctccatgtacgaacctttgccaagggaatatggaaaccgatggatgagttcttacctcttttttcgtccagacaaactgtcctaagatggttttaagagataccgagtaatcagctgccagctcagtagcgcatcttcagattgactctccctccttccctgtctccttccccatattcttcatcttgttccctgggatctttctccctaataaaggaaaagctcatagacctctgccccagattctgctttctggggaatgcaggccaatccagccacactactctccctccatgtaacctgaccatgccatccccctgcttaaaagctttcagtgcttctccattgcccataaagctcatactttctagctatgagcttcaaggccacttggaggtcatctggccaactgtccttcctgctacaacagtctaagtcataggctttggaagataactgattgggtttcatctttggctcttattgaaaatgtggaaaaaattatttcacctctataagcttcagtttcttcatctatctgatctcaggattgagggaaggcaatgtatataaagcatctggcacagtggttggggcactaaatacatggcagccagtgtttattattacaaaccaggaaaccaggatgcaaagggagctgcttcagctccctttcagtcagcagacaacggctgtcaaacttgggaccaaacagctacaaaaccagatgcccgctctccacaaataagaggctgaagtgcagctctccactgatgaactataacagttggaaattcacttgtactatggatatttcttctgcacctctcgtgaacagcctgttcttgctgagagctggacagtaaataaaacatctacagtgcctacttccatggggttcatgttctaatgagggagtggagaccctcaacaaagaaccagccaatgtgctaagtcctgtggcagaaactgggcagaaaagggaagagagagggaggatggttatatttttacaggatggttaaaaaattagtcttctgttttttgagacaggctttcactctgttgcccaggctggtgtgcaacggtgtgatcatggctcactgcagccttgaccttctgtgcttagtcaatcctcccacctcagcctcccaagtagctcagaatacaggcttgtgccaccatgcccagctgatttttgtaatttttgtagagagagatggggtttcactatgttgtctagactggtctcaaattcctgggctcaagtgatctgcctgctttggcctcccgaagtgctgggattacaggcacaaaccaccatgcccagccaggaaattaatcttctaataaaggttcacttaaggtgaagggagcaagggagaaagttgatatcaaggggtggcattccaagcagcaagagtaggaagtagaaaggcctgaggcgggagaggtcttagcctgttcaaaagatagcagagaagcaagcactgctgaagaggagtgggtgaggggaagggtagtgggaagtgaggccagagaggggtggatgatctgcagacacaggtggagactgtgactgtgaaatttgccctgagtatgatggaaagccactggagggttgaacaaagttgtagaggcacctgactagtttcagtggatcactctggctgaatgaggccagaaaggaggcctctgccatgatctcagtagggaggacagtggcttgaacctgaaggcagagcctggaggcagtgagaagtggtcattctgagaacattttgaaggcacagcttacagaactcaccgatagattggatgagggttgtgaataggaggtgatcccaaagactgtggcccaagcaaatgaaaagcaggacttgcccttttctgaaaaggaggacactgaggaaggaggtagcagggacaaatctggagtttgcttttgaatgtgccaagcttgagatgctgactggtgtctaggaaacacaaagcatgcctggacacccaaatgtggaggtcagggagaagttcagactggagatacactggggaacattagagtatttgtggcatttagcaccagaaaactgggtgagctcaccaggggaatgagaggacctccagggctccttggggatgctccagtgtcccaaaatcagggcaacaagagtccaagaaaagagatggggaagaagagcccaatgaggcagggagaaccatgaccattatgccctgaaaaagccacatgcaggagtctcaaggagaagggagtgaccaactgcccaatacagctgacgaccatatcagacaagactgagaactggccacaggatttggcaacatggcaagagctatatgaatggactggtgagcacataagaggagaggaagtggaagcttcaggattagacagggggccaggcacagtatcccatgccaatcccagcactttgggaggccgagacagaaggatcacttgaggccaggagttcaagaccagcctgggcaacagagagagacctcatctctacaaaaaaggaaaaaaaaaaggaaaaccagcctggacaacatagggagacccagtctctatcaaaaaaagaaaaaaaaaagacttaattttttaattagctggacatggtggtatgcacctgtggtgctagctattcaagaggctgaggtgagatgatcacttgagcccaggagttcgagttgcagtgagctatgttcatgccactgcattccagcctgggtgacagagcaagaccctgtctctaaaagaacaaaaaaaaaaaaaagagagagagagaaagaggctagacaagtctctggaggagttttgtgcaaaaaggagcagagaacactgatggtgtgagagtgatgttcttcaggagatgacagtgaatgggatctggggacaatggaggtctttggggctgttagcttgtttgttcttctctggccattccagcactcagggtcaccttcccctccaggcccctccactccagtgactcctttggtgacttatccactcatgcattctgagtctttcctgtatcacctcctgacccctccagtggctcagtcactatctagctgtgtgaccttggatgagtcacttaacctcacaagaagcagcaatcagtgagtccggtgacttcagtttcttccagtatcagggtggacagagagtcacagtggtaggacctgggggtgtttctctaaggtatgtggaaatttaggctcccctttgatctcagattcatggagaacccagaactggttattagaaaactcttgcggagtgaataggtaagcttctttcatattaattcttcacttggcaaatgcttaagtgcctgctctatccaagggtgtgtcagaggttttgcaagggtggaggatgagcctcttggattttaccctcaaagagctcataaccttgtggggtggtgggtgtgtctattcaaaaccataacagggcagactctctggcacatcattttgtgttcatctttaggaccagttgtcacagttgcacacacaaattaaagttccacaggaggtgggatgttttcggtcttgtactctatgtgcctgacacatcgtaagcagtcagtacatgtttgttgaatgaaagcagtattgaatggtaccatttaatttgtgttttgaagcaagggtgggatttggacctacacagatgggcgagggggcgcattgcagactggcgggggttggggtggctggaggcaggaggagggaatggcgggagcagatgtacagagacagtgacacccaaggcatggttggtaattgcaggccgactgtgactggatcgtgtgatatgtcaggatgcaaagagactgaaaaagtaagttggggccagatggtggagagggttgaattcaagctatgttaaagggatcagatttatctatagtaggatgatctcatgttcccatttcccagggtagttttgcctgttgtcccagggtgattattcatggtggcccctttcatgctcaagtatccctgtttggataagttatgtggtcctgcaaccctaaaggctttgtggaacccccaaaggtttcacagagggacagggtcaggctagccttgaatggtcagtgcccacagtgtttgctggacctggaggcaggagctgggacaccctccagtctgggcgatacaggtcaaagtcttttggttaatggtaaatcaccaacagtggccagggtacggtgaaatgggcactcttcagggagtgccctgaaattgttccagaccttttttggaaatcaactttgcagcacacgtcaagagccttgaaaactgtccatgccctttgttaattccacttctggaaatctctcctaaggaaataattccaaatatagaaaaggttctttgcatagacgttcatcataaaactctatgcaacaggtctagagacagctcagaatgccacaacagatgatattaaggacataggatatatctatcaatggactctaagttccatagaacagggacaatgtctgattacaaccactgtatccccacagctaacatagtgtctgacatatttaatgaataaacaagtgaataaaaatttatatcaggttaaacaaaaaagatataaaacaatccttaaatatgatatataagttcccatgtggacacactatgctctcaaccatttttttaaaaaacagacatatgtatatgactatgcatatgaaaacttttaaaatgactccccaaaatgtaaacagtgattatgtctgagtggtggaactcctgataatttccttttttcaattttatttttgtatatattgtatatctttcagaatgaatatgattacttttataatggaaaaaaaaaggccacatcaatactttaaaaaagaaaggctagcattaggcagggttttagcactcacagccaggacgtgataaagttttgcatcttccaagggttcccagtcagtctttgtggtatgagtctccaattccagccatgatcctcctctgtaaggtgggtacctctcacaatgggtggcagagggtccacttgctggctagagatgccctcccaccccccccaccacccccaggagctagagatactgaggggtactggctttcactgggacagttcgtacacttgtaagcggccatcaaaaatgatatctaggctgggcacggtggctcatgcctgtaatcccagcactttggaagtcagagcagagcggatcacctgaggtcaggagttcgagaccagcctggccaacatagtgaaaccccatctctactaaaaatacaaaaaaaaaaaaaaaatagctgggtgtggtggcaagcacctgtaatcccagttacacaggaggctgaggcaggagaattgcttgaatccaggaggcagaagctgcagtgagccaagatcgtgccattgcactccagcctgggcagcatgagtgaaactccttctcaaaaaaaaaaaaaaaaaaaagatatccagcaagatgaaaaactgttgatgatacagttttaagtgaaatagagcagaatacaaaaagccatgttcactaagaacatatctatgcaaactatgcacatggcaaatatttatcaaaagaatgaaaaagcctcacaaaaaatatgaccacatgcagccagagatgagacagacaaccaaaactgaatgcaccttttcagcaataacaattttagagacgttcccagaactaggatgggtgtctacaggtgcttacccagtgtctctaggctccagggcaacctgtttcttagagcagagcttctcaaactttaatgtgcacacaattaacctgggatcctgataaaacatggatttggattcaatcgagctgggctggcaacaaggactgaatatctacaaactccaggtgatgctggggcacagaacacactcaacgaggcttctacccactaccccaattcttagcaccaaacactttccccagaggcctagcctggccctccgtcctcaagcatgtctgcacctgaaatcatctttgtccccagcatcttggcaccatcgagactaataatgagaagcaactccaggcacttgcgtgggatccaggggggcctgaggcccccaattccttgggaagcttgaacaatgacatctttctggggtgatgggaagacaaaagtgactccatcttggatgctaatttgcccatgttgacttctgattagccccagtcccatgaatgcctcctgactcctactttatttactgtcccgagtgtaagaatatgtactcctgcttttagatcaaagcaagcttgatgttatcatgcaaattctgggctatgatgcacatggcgttcttgcctgctctggcacactacctttcactgtcttgctggagcatgtatatccttttcccttggtatataagccttgggtccgagagtaacagtgcagagatctgcctgtcttgtggccacccgagaccacccgcctgcttaaaagttccctcaataaatcactcaataccaacaaactggatttgtctgcttccttctttggtctcttggctcctttggcatttgggggttgctttgtgcatgtgggcttttcacaaaatagatgggtcccggagcctgggcttcgctggcaggtggtcacctggagcagccagcagcagatggcaccacaggacaagcacaagctgtgtccaagagagtggctcaagaaatctgcccaaaatccaacacaaaaatgaacaaaggaactgaatgggagatgtgaccaaaagaagcgataagacaaacagctccaggaagggagctgctggctcaaagagcacttgtcttgggcgtcagttccaccggttcttggtcaggggtgagagccctatgccagaccccctttgcagaacctatgctggcttatgatgaggctcttccagggctccagcacatgaacaccctgccctgggaggctatagtaggccagccactgtccactctgctggagggtcagtctgagccaacagaaccatgcggagacatcccatccaatgcagcccaggagcagtcttgacatttctttccctgcaaggacaggctgtctggtccacacatagatgaagccttgggcctggttcagcatccagaggactaggccataacccccaaggtaagatattcacactcattggagccctttctcctttttccctggatggctggaggaaggggacccctgcttttttcagccagtgccccatgaagttagactcccaggactccctgcccctgatcctacttaaggccactgggatgcccaataccctgaggaagctttgaaagatacgtggcacattatctggggcaagtcagctcagtggtcagagcacagagtgaaggaggctgcagccatagccttgagttctggaggcctctgtagtgggtcaacagtggggagagccacagagtctcggtccagctactgtatcaaatgaggtcctgggaggcaaggaagggcaggcaggagactatggctgcaggagcctgagccctggcccccttcccatgctggactcctgtccagcaccaaacattcagcagtgagtggcacctttaccatcaacccaccatggaaaacttccctggagctctctccttgtgccagggcctgcccatggcatgtaagacacaagccccatgatggtatggatttcacctgcaaggcgcttgccatctcatcgaggagaggaacttgcaggctgatttccatgtaaggtggaagacacagtgatagagaaaagggatggagtaggaaatgagtcctggaattcctgcttcagagggctgtaagccaagactactgcatctattgtcttcagctggatgcgctaatgatctaacagtaatcccactgctttgcatccacagaattctttacttctgaagcacctccacacaccatctctcacagaggtgaagagttgaccaaggtctagagctctgactccaagcgctccttccctcaccccacagtggccccgtggtctcactggtggaggtgaaatccctgggttcccaggccaggcatctgttgctgtgtcaccagaatgaaccctgcctgctgccagcagacatctccggctctggcatctttcagctcaagctgcaaggcttactgtgacctctggaatctgtgctcagaattctcccaggaacaaacagctgaagtatcaaaatgccagtcttcacgatgcaaatggatgcaaaaacagctcttgccagcctatctggaccccagaaagccaggaatgctggggtgccaccccagcttgcagtgtgcccacttagctaagtggaagagcctggcaagggacatggcagggagaagacctagacctggttaaatgggattggacctgccacttagcctcagggaccctttggagacttccgtatgtactgtggacaggggcagatgctctgactcctccaggggggcgctctgctggcaagtcagcaccagggccttgatctccttcttgaagttggtgttgagaaagccatagatgaatgggttgacacaggtggaggccatggcaagcaagtggcacactaagaagatgaggttcccatggcagatggggatggcctcatggtgccagtcttccaggctgttgaacacatgcagaggcagccagagcacggcaaaggccaccaccatcaccaccagcaccacattgacctgcttcatgtgcccagctcgcaagctgtaggtgcccttgtgaaacacgcgcccctgcctctgcaggcgccggtagatgcgtgcataacagaccaagatgaagcccagtgggaggcagtactggaagaggagcaggaaggtggtgtagatggtgcggtggtgagccagtggccaggactcggtacagaccaccttatccgccaggaactccagagccttggagtggttcttgtggaagacattctccaggatgctgttggccaggaagggcagggagaggacacaggcaatgacccagatgagcacaatccccaggtaggcctgtgagatgctgggcttccagcctgttgggttgatgatgagctgatgcctctccagggccacgaggacgagcgagaggatggagaccgtcaccgacatgcactggatgaaggccgacatcttgcagagggtctctccaaagatccagtagtccatgatggtgtagacggcggtcagcggctggcagaggaggcacatgaggaagtcagagaaggccaggttggcgataagcaggttggtcacgttggctttctccttctgcctcacagttacacacatcaggcagaggttacccaggacccccacgacagtctcaatgctgtaggaagtgacaatgaagaccatcacgtccacggaatcctggcaatgttcagagaagttgtatggggtgcccaggggtttgcttctgttttcaccttgtggagattttgggagcagcaaggccaggaggtgagaggtgttcatagtggatgtgaaaagattccaggactcttgaactaagtgatacacttgagggatgacgcctacaaggcaaacagacaaacaatactcagggatcatgcccagggtagaatccagagaggagcagggccgggtagaaaggctctcagctgcttccaacccaaggctggtatctggaggggctattacctaaggctcatggtgagacattggcatccaatgattgctaccttgttagaagcacttgttgcatgctgggtactgtgctcagcactttcgtctattagctagtttattcctagaggtagatattatcaatccgtttcatagatgaggaatctaagaccctgagatggaaagcaacttgcccatagtcacacagctaattagtaacagggcccagttacaaactcaggtcatctaatgccagaacttgttctactaattccctccggcctcaggatgaggctgttctgatgataaagaagttggagtgctgtatgcagactttagtgacggaattgttcagggaacatgggtagaatgccccttgtcacattttatctgaatggagacagcaataaatgccactctgcacaggattgcttgtgtccttccacggcaccccattcccttcaagatagagctaaagcctcggggatccacaatcagtgcaccctcctggtctcagcccctccctgccctggtagccttgttttttaggtgatacctggcaaaactgaagactgcccagtatgcaaagcctggctcatcagcacaccagcttcttcctactacccaccatgtgcacagacatacctggccaaagtcacaggtgcccagtgccctccacagaacctactccatgactatgttcaagtcacttgatgcagtgtgcagctcacaagcacaccagactcttccacatctctatgccctggtacaggctgtcccttctccgaggacctcctcagcacaacggaccccctgccaagactgagttggaatttagactccagagttcccccgtgttagtgccaatgatggatgttttgcatgggaagcaccataccactacatacatcattgtgactcacctctcagattctctagtcattattaatcccacagggttgcagttctcaaccttcagtaaacatcagaatcattctagaagcatgttgaaagtgcacatcccagggcccttccaccaggagatgtagttaagtgaatccaggatgggggccaggaatctgtatttaacaagtagactatgtgattctgatgcacatggcccttggaccccatcttgtaaaacactgtagcagaaaaccctattcgagatattctttaagtctcatatcatggccatatgtattttttacatgatcaattgctatgttaaggcagtttttgcagagcacaaggccaaaatcaaccagagctcagtaaaatctatttgtcggctgtcatgaatgtcacttgctgtgcatctgatctacttataaagatgagtttctaaggtcaggacttcaacacctgcctggccaacatggtgaaaccccgtctctgctgaaaatacaaaaattagccaagtgtggtggtgcatgcctgtagtcccagctacatgggagggtgaagcaggagaatcacttgaacctgggaggcggaggttgcagtcagcagagagtgcaccactgcactccagcctgggcaacagagcgagactctgtctcaaaaaaaaaaaaaaaaagagtctcatttggtcatttaaaagatcaagctgtgaattcacctgatagtttacagtctggttatttaggaaccagatctcgaaggcaggaagatttctccagcactatggtcttcgggcaaaaagggccatttggggctgaacatggcaaaataaactattccagagccaaacacagggcccaatataagataaagaacagtcgcagctgcatgaacctgtggcagaggcactgcactcagaagcagcaaatgggccagaacccaaggctctgggtgaccatcagcaaggcttggccagtggtgtggagaaacaccattcatcccaaaccaaccacctaaagcaggatcagagtggaaggactgggctgggagggctccagaaaatgctcactgcttcattcacccactcaataagtgtgtgtcaagccctgggctagaaacaagggctgcaaagatgacttatacagtcatggccctcccagagcagaggggctgaccagcacgaatgcagatggaactcattgccattgccaacaccaatatgaaagagaggcctgtgagttgagagatcagagaaggagcagggagcagggaggtgagagaagaggtggcaatggtacagggctcaaaggctgaagaggagtcaaccagccaaagggacagggagaggagggaactcgaagtgcaaggaacagcatgtgcaaaggcacagaggcaggaaggagcagagcctgctgggaaaagtaagcagaataagaggttccagggtggcagatgatgaagctggagtggtgggccagaccagcaaggtcaggtccattccagtaagatcacttggatatagaaaatggattggcagagagggccaagacaggaggaggaggagcactgaaaaggtggtgttgggcatctgcctggggctgctgggcttggggtacactgaccagtgaggaccaggggacctcaagtccctcaggcacacccaagggggtggcgagtgtatgagggggagggtagattattacgcaaggtcaataaaatggtgtctctgcattttgtccccaggcagctctccagatacaaaaactagaaccagctgcaagccccaacagggaccccctgcagcctgccttcccagtcaatcagaggaaaattaatgaatcatacacacaatgctaatctcccagtggggttagaatagggaaggccctttgctttgtctcctgaaatctcagcaaaagctactatatcctaatgcccatagcgcccagacacctcagatgcaccccttacctccttggcttgcggcttacagggtgcggatggggccgcccatgtctcaggtgaggagactgaggtccacagtgggggtaggatgctccccagatccagtgtgacgctctgcgccccgggccaagggcaggcagcgcgcccggcttcccggagggttcgtaccggggcccactcggccccgcccccggccgcactcctgtgcccagggggcaccaggcgcggggcagagccgcgcctgcttcacctgctcctgctgccccgatgctgcctgcgtgcagagtggagcggctgctacgctcccgcctgcgcccgcccagcctgccccttgcgcccgcccacgagagggctccagccgcccgcctgccccgggaccccagcactcgccctggggagccgcatcttgagcccccaaggcctgcccggaactgcagccctgcctgcgtgtgtctctcacgcccacctcaaccctggatacaggcaggctggagctgcgctgtctttctctctctctttctttctttctttctttctttctttctttctttctttctttctttctctctctctctctctctctctctctctccctccctccccctccctctctccctccctttctctttctccaggagtgtttctctctgtctaggggtgtgtgcgtctgcctgtctctctctctctctgcctcagtttcctcatccatgaaatgggtataaaaagacctgcctttcataagttcgtccagaaacattacttgcagacctcctatgagcctggctctcctgctgggcaccagagctggacaagacaggctccctgtccttggttccttctggagctctcagccctgggggagaagacagacagggtacaaggaaagagggaaataaattattacagggggtgagatgctgtgagcaaatgggttcgataggccagatggatggcacagccacggcaaaagccctgaggctgggagcattcagcccctggagaccaggggagggcagtgtggctgagaatgtcagccagggtgagggaaggagatgggcatccagggtgtgagtgaaaactcagggtgggccctggaagtggagtgtcttatctcaggcagtcccaaggttgtggcgatgagaattcaatgagaatggtcactttctcctttggagctgagatgcacatgacttggctataatggaacagctttgcttacaagggctgctcctgttttgaatacactagcttataattccctgccccccatccccacatggcaaagtcacatatgcgcttagagaacctcctgagagtaacagatctgcttcaagagcacctcctaaacactggacatacacacctgtccagtgaacctcctgtggctccccatggaaatgtccccatgaagtcatggcagtggtccctctagaatggcagctgccgtttgtagtgcagagactctgcagacactaccttagttaatcatcacaacagctctgagaggtgggcatttttattcccatcgtgctgatgaagcaaagtgacactcagtggttgagcaacttgcccaaagtcactcagctaagaaacagccagatccaggatgcgaacccacctgccaagcccccaggcctctgctcaccatcgctgtagactggcacctgtcatctcttctttctggaccatgctccttcctgtcttgactacctggaaagcggctgctcctccgttgcaccccagctccgatgtccctgctgccatgacaaattcctaccaccctcccatgctctgctgcagaggcagatgtagcagcctagttggttgtctgcctgagcagctttgtctccccactcccctatgtctaggtcacagctcttgtctccgcctccagatcccagcacaagtccacacacagcatctgacaaagaaagaaaggaagaaaggaagacggagggagggaggacatttaagaagacctgattgtaacggtagcttccagacatgtaaaatcagagaacattgcttgaccagaaactgctcaactccagctgggagctctatggacacccgtcctctgtgcaggcaagaacgcagccactgtcacctccttcttgcagggcagctgtgtggggtctggatttgctggtaagcccttggaggcaagcttccacatagacacatttgagaactactgcgcaaggcacgcagcctgaaccctagctcttgtgggtcagagaacagcagaagagctgaaatggtggtaaaagcagcaaacagctcccttgccaggcagaagcatgtgaacctgcccttagtccatcctcatgcctaactggtgtggtatgatcatcccatctcacaggcgagaaaactgagcctcaaagaagtagagtgtcttgtctcagccagccaacttgtagatggtagggctggactttcaatccaaagtccaagctcttccttcaggaccataatgcccaggagaggggtaggtagctcttcctagcagacatttcaggttaaaccaatactcccagagttggctgccagaccctttgcctctgctagggaaaggagacagcaccctctggaggcagcagagccctgcaccaatcatagccagagcacttgaagttcctcaagaaagcagtctgtaagaaagaactgggagctgctgttcttcccccttgctggagtccagggtccggagcacagcctgagaggctctgccagtcagccaggctgcattctgccatctctggggaaggggctaggtaggattttccttctgccataaaagtggctggctggtgtgacctgctggagactgcttctcctaaatagcttagtgacaggttcccttcccaccccatcaggaatgttcctcatgaatcacccggaagtcagacaggcgcacaactccctcaggtgtgtgcagcgctccacattacctctctgaacctcagtccactgcatgctcagtattccccctggtcctatgaggaagctgaagatcagctagtcaggggatggatagaccccaggcaccctccttactgtaaatttgctgggatttggaatcaggcccattcacagttgcttacaccacattgagagtcagtgtggtgactggtcacaagccgggcacagaagccgtctcgcattgccccagattctcatctgcaaagcggagctaataacaaagtttgcctcgggagatgttgtggcaagaaatgagttgagatgagaatggctctccacacagttatgggcaagaaacaccctgcagagctgtggctataagcattcctgtgtcctgcatgcttgcccacctccctgagcctctgccccagagctaatgggctgtcccgaccaattctagctggaaacctctccaaaccctcatcacgacccacacatctcacctggacagtcctaagaggccctgcaagctcagccatggtgagcacctcctagacactggacagacatacacaactctccagtgaaacctcctgtggctccccttggaaatgtccccatggagtcatggcagtggtccctctaggatgggtccctctgaaatcagtctgactctcttcctctttcaggccttctagtgctgcctcccccagactcattctgcatgtaaactctccattttcagggagtatggttgagtttctcagatccaggcttgtgtagatgttgcttccacggcctgaactcatcaagctctccattctcagagacccatcccacacacacagctccctgagaaatgtccttggccatccctgcccgcaacctgtgcattctgaagggcagctgccaagcatggtccactcacatatagctagctcccggaagctgtcctacttttttcatggaaggctatagcagagggaagccacatcagctatccggggaaaccagtttattttccagtacttataacagagaaccaaagatcctcacacatttaggaaatcaacagcacaaaggagataggtcaagatgaataaacaaaataactgaccccaaaagaagctgaaataacttagggaatagaaaataactttaagagaccaaaacttcctttaatgcctaaattagagaaattactgaatccatataacaagagcagattgccatgaaataagacagactaagaaagcaagaaagaatccttgaaaactaagcatgactactgaaatttgaaaacacatcattagaagggatgggagaaccagcttaggaaatatcccataatgtagagcaaaaacacagaaagatggaaaacttcagagctaaaataagagacatggatgattaacactaatgacccatcatccaattactaaaatttccaggaaggaaaaatcaagacaatgaaaggcagcatatcagtcatagtctgcacaggacacataattcacccccagattgtcaaacaaagggattttaataaaaaggtaacttacagaggtgtgggaagcattaaaggaaagaaacaagaaatggtgaggcacccagagactggcagaagacagaagcaatcaccaccctacagttaaaagaacaaaaggagaaaaccacattaccacagccagaggactgcagaggaagggcccccagtgggagcttctgtagtgtggaggcatgccaccgcctccagacagcatggaagcaaggggaagtagaaaagaattctaccaacctctctctccttccacttccagtctcctgtcagtccctcccattgaccaaacccaactggagccctgccagcaaaggagccatcagcttcccctggcacagggaagagcagagaaccacagtagagaatgcatctgggtggggtgtgagcaaaatagtcgacacatagaatcatcaatagcaagagtattccagagctacagattaaaaggaagcccgaggaactgctccacacctagacaggtactgcaaaatttcaaaacaccaaaaaaaaaaaaaaaaaaaaaaaaaaagaagattctaaaatgttccatgggtgggagcaggaagagaaaggttgcctacaaaggaaaggagagacagagaccattctcagtcttgtcaacaacataggatgatggaagactctgaaaagatggagctatatttttaggactcctggaaatatattttgaacctaaaacgctcatctcagcgataatatcaagtgtaaaggtagaataaggatatttctaaacttgcaagcttacatttcctgaatcctttctgagagagttcattaaggaagtgtattagtccattttcacactgctataaagaactacctaagactgggtgatttataaacaaaacagctttaattgactcgcagttccacatggctggggaggcctcagaaaacttacaaccatggcagagggggaagcaaggtacatcttacatggcggcaggagagaggctagggactcccaaacacttttaaaccatcagatctcgtggaaacttaccatcatgagaacagcatgaggtaaactgcccccataatccgattacctcccaccaggtacctccctcggcatgtggagatgacaattagagatgagatttgggtggggacacagagccaaaccatattagaaggtactccagcacaactggtataaaatcaagcaaggagagatgaggtcaaagaaatggttgaacaggcccaggagcctgggattttctttccctacgcaaatagtaaacctgcattactgtatttctaggggaattacagggatcgatgccatgattaaagacatgaaagatgcagggacagggaggcctgtcacatttctgcccacttggctcacctctttagctctttagcctgtgcaggaagttgctgaatcttggagaatgactgtatgtcgtcgtaaatttaatcaggcagtaactccaattttagctgcttttctaaatgcaacatagaacaacttaaccactctcagcacttagtatgtagctattgactcagcttgtgttttctccccatctgtatcggtaagaaccagcagaagtttgctttcacctggcaaggatagaagtacaaagtcagtgtcttctcccagatcatgttcgttttccagctttctgttatagtgtggtctacagagaccttgatcttctgaacatcccacagatccacagatggtatgctggtgcactacactggtagcacatgctgattgaactgatgagcagggagaataaaccagatgccttcataagatgcatgcagcacatgggcatgggtgggacagtagccatcatagcccgggtagtctaagctaagcacacgggatatgtaccagatggcacccatctggcgtgggggagcctggcatggcatgtcagagccagaataggacaaagagtggccatgcagggaggcaggggcacggtggcctagcacagggtgttagagtccaagtactgtcaaatgaaagtccacatggcagaaggggacaaccaagtgtggatgccagagccacacagaatgagtggaggggcagagttctgctatggaagattgggtatatgcagggggaccaactgagcaaagttgggagccagttttctcactcatggagaaggcagtcatgaatatggaaggagggaaacccagaataagccctgtggttttgattagaattgaaagtattgaagtgagctcatggttttctatatagagagataaatattgatctaatagtgtgtgtgcatatatatccttgctctgtccactgagagagtctaggagcagtgataccccaatagcaatgaacactcctagcacccatatattgacttctaaatgccattctccattaaaagaatccaagtctccttcggaaaatggctgattccagggcaagggctgggaaagcccaagataaacctgaaagatcttgggagctagaaagtaatgaagtactctaagaatgaagggtgcaggccagaaaagcccagaacctggcttgaaggggcccttgatggccaaatcttcgaccatgtgagcatcaaagtaaataataatgatgatggataataacctactgaataaaataaaaatctgagtccatttcaatataactaaatgatggagtaaagtgacagtttgatgaggaatggaatatattcatggtttcagtgtgcctcatcacaaaatatttgtttattacaaagagaagagtcaccttacagtggagaaggctggcagtcacctctgtaatcaaatgatcatagcgaacaccatctctaatcctagagtgaaattactcaccgcatgacaggatgcaaggaaaacgtagcacagcttctgtgatcttcctgctgaaggtgcatgcaagtgaatccaaccctgaagaagcatcagcctcaacccaggtgagggacatactacagaataactggcctgtcatctggaaacataaggccatggaagtcaaggaaagaagggagaaccattccagattgaaggagaccagagacaggagaatgaaacctgtgtatcttgggacagctgatgaaactttagtggagcctgcagatgaggcggtagcaaggtgttcatgcaaattgccgggatcatgctctcaaatggcatagaaaaattaatgttctttatcctcactttcaacttttctataagtttaagatgatttaaattatatttttaaaggtgtcaaaaattttcttcatctttatagaatgaaacagaaataaaaattgaaagtggtaacctctggaaatagaactgggggaaagaaggaaagaatatcaacgggagttatctgacccataggattttaggtcattttttgctttgtttccttttctaaatttctctctattaaaaaagaatgaatgattacaactttataaaggaaagaatccataaaatatatgtaattaaatcccatggtacaaagggcaaagaagcttggcaacaacgcttccagcctcagttttgtcatatgtaaaatggagcaaagatgggttcaggctcattacaaactggtgagggttcaaataattaagggatagggatagaatatcaaagtattttcaaagccacatagaagggaggtgtgagggagggttcctaggacttcaaagtcggaagccgataagggcctggccttccgagaagccttctaagtagagattctggccagcagggctgctgaagtgggcacacctgctgtaggaggcgtctccttgggccctgagggatcacctgttctttgtttgcctttgcttctctgctgaggccataaagaggctgggctgtaaaataacctactctggccccaggaaagagataagagatgtcaactgggcagccaacaccttccctgcctcccaccccaaacagctggccctgccctccccacccccacctcttcttctctccagagtaaagctggacttccctactgcctcctgcctgtcccttctcaccaatgctgccaccctttttctccactctatttcaaggaagtagccatctgccactaaaactttatcccatggtccaatccatgagcttgaatccaaccagcccagagcagcattttcccccttgatagagaataagagaaagacaaagacaaaggcacattatttccctaaagtcctatattccctgtcttctgtgaaccagtgaaattatcaacccacagtgggtcagctgcccttctgtggagcacatcagaggaaaaataccaacgcagccctggctgcacactttgtgtcgactctcccaatccttctccctgccttctggaactacagagattcattcagtctactgtcattcaactaatattttaaagcagttcagtagactgaatgttacatggacaatagactcagtgttacagagacactggatgtacagtttcgcttccaaagacatgttataaaaaagggcacaaatgggataataagtaaaataggcaccagattaccatatgctttgaacagagaatttaccctattctattccccatctcaaattgtgcttagctatgttgtcctaccaaaattccctgatatggtgatatattagttagctaaagctgagtaaaaaagagccacagaatcttagtgacatacaattgacatgactgcaggtcagctggggctagctgacctaggcgagctcaatggggcagctctgtttcaagctatgagtccaactgaacttggctcctcactgagatttaaacttctccactgatattccatctggggctcaggctgaaggagttcaaagaagtgttatgcatggagatggcagcagttcaagaggacaagcccagctatgcaaggtaatttccattcctccgtgagtcacatctgctaacatccattgaccaaagcaagctacatggctgagcacagttgagaggcaaagaactgtcccccacctaccctgaggccaaagcaagtcagagccatgcccaacattaatagaaccagtaactacactcttccagtgaaatggagaggtggaagagtgaatatgtttgaacagtagtctcatctatcatagtcaatgatacaatttcagaaatattaaggaaaccagtatttgtatctatctcattgaatataataatgaaaaatttctcatcttacattaccaagtccaactcacttttttccacagataattttaaatcttcccccaaaagaagccccattccattttctcatggaaataataaactcaaaatttcccatcccctagagcagtttcactctgaaacagatacagtttccctacacttccagactgggctatagaaagttctacaaggacacacaaacatagacaaaaaagaatattgcaatattagtcgtgtgtgtgtgtgtgtgtgtgtgtacatacatcacatgagaaaattcccagatccaaatgaggtataatagcagcttataattagagtaactattccattatacaaaaaaattatctcccaaaaggtactgttaaatcaagtttagccggccgggtgcggtggctcacacctctaatcccagcactttgggaggctaaggcaggtggattacctgaggccaggagtttgaaaccagcttggccaacatggtgaaaccccatctctactaaaaatacaaaaaatagccaggaatggtggcacacacctgtagtcccacctacttgggaggctgaggcaggagaatcgcttaaacccaggagatggaggttgtgatgagccgagatcacgccactgcactccagcctgagtgacagagtgagactccgtcttaaaaatataataaaaaataaatcaatttagcctaaatctgcctccttacatattttaagttcagcctaaaggtttttctgtacatcatgaactataacaagtggaggtgtaaacagactgtagtctacacttgtgctaatcaatgagttttggccaatcaaatgtagccaactgtttgaaccctgttcaaataaggtgaacaccaagctgtaaccaatcagctatttctgtacctcacctccgttttctgtacctcactttcctttctctgtccataaatcttcctccatcacgtggctgtgctggagtctctgagcctactctggctcagaaggctgcccaattcgcgaatcattcattgcctgctcacttaagctcctttaaatttaattcagctgaagtttttcttttatcagatggtgtcagagcagatctgaagtagagcttctaacgactcccaggagtgctgagtgaccgaagccaggtacctgcaggacctatttgtgttcgttgatctctcagagcagttggaagtcatggtaagttttctctccaatgtcagagctccactgatttgtgttttgagctctccgagtttctttgagcaaatttctgttccaaactgggtttggaagtcatgacagaaactgggctggttcaaggaatggatttgatctggtaattaactggcttggatacagttagaggcctcttacatctgactgggtcagaaagaaatgtagtaaatggtaatattgcaggggtgtaaaattaggctattgaaaattcacagggatttttgtgttttacccctttgtttcttttttttttttttttgagacagtctcaccttgttgcccaggctggagtgcagtggcgcaatctcagctcactgcactctctgcctcccagattcaagtgattctcctgcctcagcctcctgaggagctgggattacaggcgtctaccaccacgccctgctaattttttgtatttttagtagagatggggtttcaccatgttggccaggctggtctcgaactcctgacctcaggtgatccacccgcctcggcctcccaaagagctgggataacaagtgtgagccactgcacccggccttgtttcatttttcttatgcactttggtaggagaaaaatcattggctaggttgatcaaaggaacctgagagcaaagccaaaatctgaggtaaaaattgaatccttaatttcttttttttctttaatttgagacggagtctcgctctgtcgcccaggctgaagtgcagtggcgtgatctcggctcactgcaagctccgcctcccgggttcacgccattctcctgcctcagcctcccaagtagctgggactacaagcacccgccaccacgcccggctaattttttttgtatttttagtagagacggggtttcaccgtgttagccaggatggtctcgatctcctgacctcgtgatccgcccacctcgcctcccaaagtgctgggattacaagcatgagccaccgcgcccggcctggatccttaatttctgaagaactgagttccttctggctaatacctgcataagtggtaggccccggaagcagcagtcttatagaaatggtgaaatcttactaaagataacttagagtggaatgttccaaatgaacaaaactgcactgaagtgcatttgaaaatgagggctcccaagttagtctcatctagggatgtctattgatatgcagaagcttctaaaaagatttcagtatttttatttaaagactttacaaaaggcaaatcgaaagcttatgcgactcattgacttaaaaaattaaatctgctagccttttagcttagttacgatcccgatccaaaggaaatagaccgcagcaccaatgggctgactttgggtgagtagtgggttcattttacctggtaaaggatgggattgggttggaggccttccccctcagtaaagtccctctttgttaaacgtggatttggcaccatggggttaaccactattctctttggagtgatctgccttgcactctttgctaacaccagtgggtgataggattaggcgtgtaccaggccatagaacgtggggaactttttctccccaaaggggaaaatttgggagctgatgggactgctcgaaaagatccttcacgaccaacaatcagccgcctgaacttttgattcagcatccctgcaatgggtgggtctttctctggcctccctgagctcctcatcttccccactctgccacaggcaatgcttttctccctttctcttctttccctttcttttctgttaaaagggcgtccatcttgcccaaagatcacatgttgaaactcctttaatccactttgaatgtattaaagatgatagggaccaactgggggcaagtttgagcctcacaagttcgatagtgggtgctaagcagagtggctaatgtctatgttttgtcacatgtatttttctctggccagaatggaaaacattaatttgggtcctccatgcagctagttgggtggcaacttgcaaaattgagaggcttttgcctatggttacaaactttgctacagattcctgaaacaagcagaaaactgaatgaggtctccatcttgttttatgtcctggggagcttgaccttgtaacagcgtggcagtactttctcttggtctctgccatctagggaaaaggaattttggggctcatatcatagttagctctaaaaattattttgagtagttaaaagccattgcaagctcaaaattgattgctctagactctttgtgggaaaagcagtggaaactgcccaatgttttagctcagcagctaagggtttgccattttataatggcagcctgggttctatcctagcttacagaatgagtacattctggtggacatctctgtgacctttaccgtttgttgattcccttcccctccattaacaacttctggcttcccttcttaaattttcctttctctgagctacctttgaagattcttaattttgtaaaaattgaaaatacctcatacactcatggttaagtcataaccttagttgaggtttgttggtttcactcgtagagttacttacggtaaagtttaaaagccagatatattggctgtttgccctggctaaactagagtaatgagaaattaaaagaacatttttgtgagtgctgtggttaaaagtcagtttaattaaagctgacttggatacatatatccaagctatatgtatatttaaatggcctttatgggtttttattcccttcttggatcttatttttctgaagaaaataggtttgtttgttttttcttctcagtcaactgaattgtttttctccattttgtcttcttgccacacttaatgcacacatgagaagacctaagataacttccaatagtctgggactccttaggaaaaacagaggaagtgccatagacccggttttgggaaaaaaactcgattttcctcatgaaaccccaggaattgaaagtaaatagattttgcattgtgttatctgaaggttttcagttttgggggtatcaaaaattacttgcattataagagaactttcgtgtgtaataactaggtaggaaatatacttttagagatggttaatggcagttatggggggatactaaccatgcttgaatcagagaagcatgctcttggccacctagaaggtacggaaaaatccccaccccctactaggagtcaaattaattgactctcacgggggacaggctgattgcaaaatgggctgattggctttgggttgccatgcaattaaatgcatggtaaaagcattgcactgtcttctatagcattttcctctttttagggatctgggatgtaatataaaaatgggacccttaattttggagatctgtttttgtcattcagttgtgcctccttattaggtcctagaaaccgcatcctttcctggccctgctccttgaaggaccccaccctgaagccagtaatctaattaagaaacttaaaaactggcaaatgaaaaatcttacaactagtggatctttttctatctgtgtagttatatatgtgtcgtgtgtgtgatgtttatataaatgaactctaagtaactggcttaaagaaaaataaggcttaaataaaatattttgaaagaaaaaactgtaatgccttgtagttcacgtgactttagtaatctctgagaaataaaaacagttttaaagattactggtaaaataaagacatttggtctaaattaggtaggtcaggctgggtgcagtggctcatgctcataatcacagcactttgggaagccaaggcaggcagatccctggagtcaggagttcaagaccagcctggccaacgcggtaaagccccatctctactaaaaatacaaaaattagccggacatggtggcacatgcttgtaatcccacctactcaggaggctgaggcaggagaattgcttgagcccgggaggtggaggttgcagtgagccaggatcgcaacactgcactccagcctgggcggcagagcaagactccatctcaaaaaaaataataataaaataaaataagtaaataaattaggtaggtcagatattaggtttactaaatgctttaaggtcataaactgcttctttggcttttgaaaattgttcaacttgcctgcttaacagctaggtcagacctaaggacatgtggaattaaccactcccctagctatgctgaaaagggtcagaccttatctgtacttctgtctggtgtcctaggctccaaacctagtacgtaattaaaatcacttacttaacagggttttcaccaaaaattaatattgctaagaattaacattgtaacatgtaattaagactactaaaaaaagttgtacatgcaaagtgtatgaggaaagcaaaatgtgcttttactaaaagattataacaaggcatggaaatgtaaatttttgcctagtttagagggttaaagtattgttttaaattaggataaagctaaaggtttgaacaagttgtgaaacagttgtgaaaaattaattgtaacagagattctatgtatgaacatattggctaaatttaaaggggtattactcagttttttctgtaaattgaacattggaataaaaccacaacagtttccttagagcactgatctgctctttaacaaaaatggtaaagggttataaaaaagacttatgagaatcttatcttatagtcagacattaaaattgaacatatttgtctataaggttttattaagaatggggtttgacatcaataatgcactaatgcaatgctaaaattggctttctctcttgaacaagatttttatgctatatttttaaaaatgaaacatttttgtttgccttttgaataaactaccaaaaaaagaagggaaagacgagacagattgtttggaaagctaagtcttccctccatcaatgagtaaaggtttatgccttttatatttttgagtcatcattttggctaaatgaatgacttatgttgacctgggattctatttcataatattaagtgttttaaaccttaataacatatttgataagcttcccaaaatcaaatttcagcttcaaaattgtcttttctgacctctaactttgaggtgctacagagggcccctgaagcatccaaaagagaggttaacaggattatttgacatgttaagttacatgagaagcattgtcaaaataaaaactaatgtttaaccttcttcaggctatattttagtgaatgatattaatatatgttccaaaattatatggggtttctaaaattctaatatgtctgagtatatgctatcaatcatagttattatgttaagttattgtaaaccacagaaataaccaaattttcttgtcaattctgtttttaactacgcctatttaaagtcatttccacagttatttgcttactgctgatgctgtaagatcttggtgtgtgtgtatatgtgtttagatgtgtttacacatatgtacatgtattgtgttttatgttgtgtctacatggcaaaatctggcatagctggccaaaaattccttaaagaattctatttagataaatgagcactcatataaaatatacagcaatgaacaaaaatttttttcgttcacatgacttaagtaaatattggatatattaattggcttcaaaattgttgataacataaaattagaaatgtcccaaaattgtcaacatatattttttgcctgggtgaactgattagacagtttatttgcttctgttagatcctttaaggttataaagctgtgaacccagcctaaaacagaatgatttttgtgcaattctttgataagtaagattattttaatattgttgattcaataaaaacagctatagcttgtgagttatcaaccaaatacccatttatttaactttaaggctcttacttaggtaaacacttgatattaacaggctaccaagttggctaataaaagaacttaatgactagctctaatacctcaattttcatagtaaactctagatatagttgttaaaaaaaattagatgattatacatataaactctagatataattgttaaaaagattaggtgactataaatagaataaacatttataaataaacttttcatgtaatctaaaatcttaaagttatggtaaattaaataataggtactcattaaatgtccggttcatatccaaataagaaaaaaccaacaaattgctaaataaatacaagtttgttcttggcttcttcaattttataataatactaaatatatttaggtttattaatcaaaatataagtaatatgaaaaaaataatttatttgagaaagactcttatgtggtaaattgttgtcctaaagcaaaacgactagttatttaagaaacaggacgtatagaaaaaagcaaaaaaaacaagtatgtcaactatggtccaagtaagtcataaaaaggttcataaagggggaagttatgaaataaattttgtgtatgatcaagttgtttataattagaagggaattatttataaatgtttctaaagattaaaatttgatactaaaaatacactaatactaaaccaaaaaaatgtggccccctatttagaacaacaaagtttttttgaagtattggtctgctcttaataaaattgcaaaagggttttatttttaattctaaaatctgttttttttaacaacaatcttctaaactgcagccagtgtcagtatctgccacatttcctgagatctaattaatttccctagttttggcttaaaaatatggtcctctttatttacaatggtaattcattccttgaggtaaagttttccttttgaaatttctcaaatttttgtctcagaagttcaacttctgctgtaccttgcagcacatgacttgcagcaaaagatccttgccttctgaactttctccccttgaaaaggtgtattttttgcttggctggggtgataattctctccttcaaccttttttgtcaactcttacatcttttttttttcccgccagttctacctctgctattatggtctgatgctgaagtgtttctcttaaaagcctagaaaagcaatgttttcctccaatataatttgattctatactcttggcttttctcaatatgtctgaattgtaccattgtaaccaggaagcttttccatgctgttactaagagccatgtattttctttctcaaggtactagttttcttgtttacattcttctataatatagtgtatactcacaatcttggacatattcttcctgtgtgggattaaaatcaagtatatttttcattaggttcaacttacaggttatattagtgagattctggtaaggagaaacagtcattctgcagattttctttttaactttttggttactgagccaaaaaaaaaaaaaaaccattttatcaagataatttattgtgttgtctttattaggtttttgattacttagaaaaactgatattgaaaaaggttaaggtgtttacatccatgtaactttctatattgcttctgaaacctcgactatcactttagttaagtgaatgactattatttttcagtgatctgtgattctgtttcaatcaaatattttaagttttttacatcattgacaaacttccccaaaatcaaatcctaacctaagtcttcatgacctagaattaaccttgggatttttctaatttggtccctggaaagtctcaagagatatacctctcatcttgtagatggggatattaaatgattactgttatttggtaaatcatacaaaaaacattgtcaaatgataagtgatactagatcttcttttagttgcatttattggtatgttgttgatatgaaagttctgaaaattctgtaaatttataaaaatatcagatgagaaaaaaagaaaaaagtataaacaaatttatagaaatatgtcttagtcataattctggttatcttaaaatgctatatataatagaaataacgaaatttccttgttgattataaactttcgtcagatttttaactatggctattctaagtttttgtcatccacagttttgaattcttctctaaaaacatttacaatcagattaatggaaaagattctaataaatactcttaaatacaggtttctgttaactttaagatcaatagactaaataaaaatgtccagatctctactaaataaattgatgggttcatgaaactagtaatcaagatcaatcaggacaaaaattaattacatgaattaagtaattgataaagatatttttggccaggcatggtggctcacgcccagcactttgggaggccgagatgggtggatcacgacgtcaggagatcaagaccatcctggctaacacagtgaaaccccatctctactaaaaatacaaaaaattagccaggcatggtggtgggcacctgtagtcccacctatttgggaggctgaggcaggagaatggtgtgaacccaggaggcggagcttgcagtgagctgagatcgtgccactgcactccggcctggacaacagaggaacactggtggtgagcacctgtaattccagttactcaggaggctgaggcaggagaatagtttgaacccaggaggcggaggttataatgagctgagatcatgccactgcacttcagcctgggtgaccaaacgagactctatctcaaaaaaaaataatatttttataacttttatttaaaacattgttgattcttgtcttaaatattttgttctccagatttaaggaaaaaatttctctttatctataatttacagcaatttgataaagtatacttttttaaacaaagataaaagcatttggtgttttctccttacttgattcttccagaattcaaaaactatttgtgagtattcttatggcaatatgattatttgcctaagtgcaatgaaaatccattctcttcagcggggcacaatggctcgtgcctgtaatcccagcactttgggaggccaaggcgggcggatcacctgaggtcaggagctcaagacccacctggccaacatggcaaaactccatctatactaaaaaaaaatacaaaaattagctgatcattgtggttcacacttgtaatcccagctactcgggaggctgaggcacaggaattgattgaacctgagaggcagagattgcagtgagccaagatcatgccactgcattcctgggagagtgagcctgggagacagagcgagaccacatctaaaaaaaaaaaaaaaaaaaaaaaaaaaaaaatccattctctttctatagcagaatataattgattatattaccaaggctttgactaaaatgtcatatttgaagaatgcacaaaatgcctgacttcaagggttaccagccttacaatgagtacattaaaattgtcatttcctggcacaggaaccttaaaactgtaagcaaaatctaaagtctgcctcagtttggcttcccagtctcaaagttttaaatctgaggttcttacgtgatcaatgttaaaaattttaaaacctgtgtttctaaagttataatatgcctcttaataaatgataactctacattgtgtttgagttcttgctatttacctatagactagtatagacctaaattcttctgggttcctctaatccaactttccctcataaaattaccaaaacatgaactgttctatttctaaagctgaaagtagacaaattttaaggaacatgtctcatgactgatgtatgtgccacacagaaagttcaccaaaaggcctgatgccataaccagaggcattcaaactgcacaccagaatgagaaattgatgtttttcatgggatagacagcttttcccaagacagtatggttgatcagcaatggttttggagaaagatcttgatcaaaagggagccataagaaagaagattatgcaaattgggccattcctattacacctgactaaatccaaattgaagggcccggcggggaaaattacttgaggcacatagcacctgctccaagaattacatttttcacaagctcaactgctgaagcttcctgttgtaacctgaaaccagttttatctaacagctactaaaacaatctgctgtgactctacccaccaccatccctcactagtcagagccaccagctctccaaaactttactaatgcaaaataactttctttcaaatgatacataacatttatcctttttgtaaaacctcccatcttttctttgttctttgaacagacctaagactacccactctgtgtgtatgccccaatttgcaattcttgcttccaaataaaatgttttaaatttagacattcatctctaatcttttattttatcttttatttgacattgacaagctcaaagctccctccattccatttctctgacatctctagtgtgccatcctcacctgcttgcagagctggctataggcagtgggaagcaggacagcagggagaaggcacgcccttagttcatcagcagcacacagaccccccactcacattcattggacagaatttagccacgtggccatatcaacctgcatgtagtccagccttgtactctgaaagaagaggaaactggaatctggtagaccactagcagcctttctatctttttgcactgaattctggagtatcccttgccttgttcttctacatcactaattctctatgtatgttatcatgatactaatcctaatcattaagttatttagtttattttgacaatcatatctttcattgccaagatctaattatttcatttctataatcacttgttcttgatatactttcattcctcttgagatatttccttcttctaaaatctcttcttcaggctgggcacagtggatcacgcctgtaatcccagcactttgggaggccgagtcaggcagatcacttgagatcaggagtttgagaccagcctggccaacatggtgaaaccccgtctctactgcaaatacaaaaattagccgggcatggtggtgctgcgcctataatcccagctactcgggaggctgaggtaggacaatcgcttgaacccgggagacagaggttgcagtgagccgagatcgcgccactgaactccagcctgggcgccagagagagatttcatctcaaaaagtaaaaataaataaataaataaataaataaataaataaaatctcttcattcaattaactctatttccttggtgctggtattcaattgtgacttttttcacaattgtttatgtcttgtttgaatacctgtctttgacctaaggttctctgagatccttcagtgagcattatctttgttacctgcaagcagtgaaggctgtctccagggctggggaggtggagagaattctactgggctgagtgtgccagtagttagtgttctatgcatgggaggtccccagtgcttctggggctaccttcacactcctactcaagtgcccgctcccaaagttgcctgctgctgggtgaaggaggacagagccaacaatctcaactctggttcctgtcaatgaaagaaaaaaatcaggcttttcgataattaaagttagttttattcagaagtctcactgaggattgcaacccaggagagcctttcacagaacttctgctagactgctccaaagcaatgtggcagcccacagcttctatactggcggtggaggttttgcatgtgctcagaagttacattagagcagaatctcctcaatgtttgggtgcacctggttatagattatagaagcataatctctaatcctcttgaacattgtcttatgtacaagaagaggcaaaagctaggatcattgaacttatctttttcttaaaatgtagtgatttaggcaagagagatggcagcctgtgctctatcctgcttatcatcttcagggcattcttctggagggctgcactcagccactgagtcaggggcttcgtaaaattctgctggcaaggagaatgaacaaatgtggcttcgtatgtgtagtattttgtctcatattcccaagaggtttgcctgctgtggctccagggccctctgctccttctacgtgcctcttccctgctggaagcactccataagccccccacactttctcactggtcctccactgcacacagtgtgggttatagtttcctctgctcaccaaatcccttctttcatccttcgaggagtccttgtattttctggaccattaagagtaatgtgacaggattctggggatgcagggaaagagacgagtcatgagtccgggatgcctctcaagtccatctcaccgccaccccataatattgttcagaacaacattcctacttccagccagaagccatggcaaatatttggtgcaattttgagaaggaatcagaggcaaagaaaacagctccttggtgtcagctccactatgactgctggtcaatgcatagcaattggcagaagcacaccttctgtgaggttaaagctaaggtgggcaagtgtgccatcagaaggacattgtaacactgtgcctttatccaagagtgatagtgcctcccctcttagagagagcatcagaaaaacaatttagaaatgtgtaacgctggcaattccagtctccaggcctattcggaggctccttcttcccctcactgttcactccttgtgctaggatctctgtatttcccttccaatgcctttaggtctggtttctggcactccagtcctagattgagcacaggatgggtctaaggagcacctttgctatcacacagggcatggaaacccgtttcttggggtgtccctccaagcactcctggttctccccggtcgcaccatctcctccccaatggccggtgctccccagtcacattgtcttctccccgcagtcctccgtccccaggagcatcccggggcttccaaatgccaatttcacgtgcaggtactgtactcacttatcttgctgactatgccaaattaagtgtgtgtgtgtttatgtgatatatcatgtggggtatgtgtgtggcacatgtgagtatggtgtatgtgcggtgtgtatgtggtatattgtgtggatgtgtgcgtgttgtgtggtatgtgtgacgtattatgtagagtgtgtgtggtatgtgtggtgtgtgaggtgtgtagtgcgtgctgtgttatgtggtgtgtgtgatgtgtgtatgctgtgtgtgtattttgtgtgtgtgttgtattgtgtagggtatgtgagtggcatgtgtttcacgtgtggtgtactgtttggggtgtgtgtatgctgtgtgttatgtgtatgtggtgtgtgtgtggtgtgctgtgatgtgtggtgtgtatatgtggtgtgtttgtgctgtattgtgtggtatgtgtatagggtgtactgtatggggtgttagtatgtgtgtctgtatgtgatgtgtgtggtgtgtggggggtgtattctgtggtgtgtgtggtgtgtgtagtgtgtggtgtgtgtagtgtgtgtgtgtggtgcagtgtgtgtggtgcattgtgtgatgtgcatgtgtggtgtgtgaggggggtatattctgtggtgtgtgtgtggtgtatatggtgtgtgtggcgtgtgtagtgtgtgtgtggtccagtgtgtggtgcagtgtttggcatgtgtgtggtgtgtgtgtggtgtattctgtggtgtgtgatgtgtgtggtgaaatgggtggtgtgtgtgtgtggtgtgtggcgtctgtgtgtgatgtgtgttctgtgtgtgtgtttgagtggagagatccttcaacctgaaggatcctgagcctttctcttcaggacaggtgaggacaccttagctggtggctgtgtttcctgccctggggagtcagccgagcggagccccaccatggctaggtgttacatatgttcagtatcacctctgacttcaaaaaagcgagcacccccatttccaggaatcgcctgggaaccgtttcaaaggagtcatgccagccaggacagagagctgggaagcgggaccacaggagcaactctgaacagtcattggatgcgctctccaaccagctgctctgctcacctcaaagcacacaccaaagagagggagaggctctgagcccatgcgggtgaatcagggtgagccacgcaaatctgctggcccctggcagtcatggcagatgctgccaggaggcctccctcattactcggagtaggcttgaagtcatgctttccagtgtgaggtgcgcgagccaagcaaaggaggaggcctggtcaggaggggggagttccctgtgacaatggaatgaaaaggctgctgcagggcccagctggccctgggcacggtgtggggaggggaatccgcaaaccaggcagagccctccagcccagggcgttagttgttgacccatctttcctccccaccaccagactgggagtcctcatcctttgcgctttgcagtttaggaagcaatctctgaagagcacaaacctatttaacaatgataaaacttcggctttaaagggctgatgtggcacactggcactagagccaggacacatgagggagatctctcttctcccgctcagcagctggcctcccttctgagggcccacctcggactgactggaggacaccacttggaatggcaaagatgggggcaatgcaaaggccacaaggatggcttcatagacaggatgtggacttggcattgggcagacctggatttaaattccagctctgcctcagtctgttttccattaaatgaagatacttgtgcaagggttctgtgagaattccagtggctgaagtgtgaagcattccccactcagggttgcacagctgggactgggtgaacactgttagtaccctcaccctgtgtgctgcagctgcatcagggccagctgcccttctcacaagcacctatgcacagatagcccccatttcaccccaaaggacaactattcagagaattaccatccatcaagccagggcactccaatcagaggaaggtgtcacttcctggtaggacaactagaagggcaggagctattcactgagcataagaggaaggcatggtacaggtggggcatttgtggagagcaagacagggagcagagaagtttctggcaacatgctgctcccagaggaatagggctgccacacctggtaccaggaaactggggaatggccacagctcagctctgccactcaagaaccccacttgccacctgcataggaaaagacaacattgtggccacagaagggtgaggggccccacagaactggggatgccaggacacttggtccatgggaagctgccttttgctctggcctgtgcctggaagcaaaaccatcatccataactccatctaaggattcttagagcagatactagctggaccacaaggggcagcccaaacctttctgttccatcccatggcctggcccttgctggcccacagctcacagaatctgctggggctccccagctcaggcagtacaatactctgttgaccatacgctgacaggtcgggcactgctcttcctagttggacctgatactagtcatgattcactcacctatgcagaagcctgtgcatgcaacaaggcttagcccttctcccatggagatgaaccttctgttcctccctcctgctttcaccacccccaccctacccaaagaagaggaagaaaacagagtagctttggcaaccttttctacccctctcccaggcaagaaaagcagaagaacaacctgaagaaccaggcttctctcctatatcctccatctcgccttcagcctgcatcccttcttactaccctctctccattataatttgctctctgtacattttaaatcaatcaaattagcaaaataaatcatgaaaaccctatacatttataaacatagtaatatgtgatgctcataagatgcaaggagatgggtactttcatagtgttgatagtaggaatataaactgaaaatgctttttttggtaaggcaatttagccatttatatcaaaacattaaaaatgttcatccctcagacccaggcattcagtctcagcaatgtatcctagagaaatctaaaatacaaaagtcacaaagctcaatgcaagaaaatgttatcatcttgctaattacaaaagtggaaaattgaaaacaatttcaatttacaatatatggaactggttaagtaaatatagcaatgggatacaacattggacaggctctaaaacagtgtttaaccagaattattaaacattcattttgtagtatgaagtgactatagcaatgtaatacaacattgggtagactctaacatggtgtttattcagaatttgttttgttttgttttgagacagggtctcactctgttgcccaggctagagtgccatggcatgatcatggctcactgcagccttgacttccccaggctcaggcaatcctcctgcctcagtcttctgagtagctgggactgcaggcatgcaccaccaatcctgtctgttttttttttttttttttttctatttatttgtagagatgggatttcaccatgtttctcaggctggtcttgaactcctgagttcaagtgacccgcctgctttggcctcccaaagtgctgacattactggcatgagccactgtgcctggcctattcaaaattctaaatgtttactttgtagtgtaaaatacatgtggtaaatttattttaatatggatcctataaaatttcatatacagtatcaatctcaaagacatttaaaggtttttttttcaaataataggaaattgaatgaaaaggaataaagcaaaatgttgactggttgtcatcaagtaataactgtgtattatttattttcattcatatattcctaaattttctaaaaggtttatactgttttgaattttttttaatctttaaggaaatcaacttttatagcttagagtgggtaaattttaattaatatgttccttttgtcaggaatatttgcaatctaaacacactttaaactttggcttttctcttgtaccaccctgttgccatttaccaaactatagtattcacagcctatatgtttattattgcttcagtcctcattgattgtatcctatggactatgcacctatttaatcctcatacagagtatactctgtaaagtatgctgtctgacactgaaagtcagaaagtttgagttgcttgctcaggataccaaaggtcatcagcagaggctgcttgatactgtcagtacttttcagatagtcactctatcagggctttagtccacagtgctcctgtggatgctaaccctacctgggattgctctccttttccttgagccctcctgtcttaggctgttttgtgttgctataacagaataccataccctgggtaatttataaagagaagaaatttatttggctcacaattatggaggctgtgaagtccaagagcatggcaccagcatctctgctttcatgttgcatcatcccatgatagaaggtggaagggcaagcaagcacatgaaacagagaagggagggggccgaacttgatccttttatcagaaacccactcctacaataacagcattaatccattcatgcaggcagagccctcatgagctaatcacccctcaaagcaccctcctcttaatatcatcgcaatggcaattaaattacaacatgagttttggaggcaatgctcaagccatagcacttctcaagaagggcaccagcagaatatgcttgtgatcgctctgaatctccatcaggtcatagcatggaatgaaggtatctggtttactcaagcatccctcccacggcctgaggtcccaagattggattttctgttcccatcattggaaagcagaggaatccttgtggaagtgcatctgccttcacaggaccacaccaggagcaggaattgtaaaatccacctctgctctcccaagagagaaggagagggagggaaggagcacatttggcaactgagagcatgcaacagaaaccattccttggagatcctatggggcaagcaatggaagggacactaatttccatctggaaaagatatggccagagctctgacttcaaactctggaaggaaggtgggggctgacccctattgaggatcttctgggcaccagatgctggactgggtatttaattctagtcaatttattgagggaatgagactccaaaaggtgaaataccttacccacagtcatgcagctggtaggtgacagagatggagctgaacccagactcttcctcttatccagtcacataccgagaccctgcattgccgttggaagctatttgcctttcttctcagcactctgggtgtcgtttgcgtgctctctctctctctttctctcagtaacttcagactagagaatggggtaccaaggtcactgataaggaagcccagggcctgggggtaaattttagtgagtcggcagtcctcaatactcagacagatcatcttcttcatgatgatgaagcaccatcaggagcttaccatttggagagataggatggcttaaccctgaatctgtgcctgactggggtctcataccctggggattttatagtgtaagctcaggaaagggattctgatgcctgagcagagagaatgccctaattaagaatgacggccagtttggacaatctccctgaatcccaccgacaaaagaaacaatggcttcccaatgacatgggtctcaagatggacttgggcagagcaggaacatgcaggggggttggtggtcttccaggaggcagggataaagcccccagcaggaggaagggccccccaaggctctccttcctatctctatctctggtcagtatgagactgagtcattcacttagctaaggaccagacaattaaagcacaggaacagatccaagcagatgtataaatctattatatggtgaagtcatactataggtcagtgaggaaaggatgagttccttaaaaaatatattgacacatctggttatccatttttaaagaaaataaagttaaattcctatcacataccatgtacaaaatttccagatagattgaatagctaaatgtaaataaataaataaatacacacacacacacacacacacacacacacacacatatatattatattataagaaaatgttgtgtaaccttacaatgaggatttctacttaaataaaataggaaacctaggcgaggtgtaatggctcatgcttgttatcccagcatcacttgagctcacaagtttgagaccagtctaggcaacgtggcaaaactccatctcaaaaaaaaaaattagccaggcatggtggtgtgtgcctgtagtatcagctattcgggagactgaagtgggaggatggcttgagcccaggaagtggcggttgcagtgagccaagatcccaccactgcattccagcctgggcaatagagccagaccttgtctcgaaaaacaaacaaacaaaacaaaacaaaacaaaacaaaaaacaggaactctagagcccataaagagaaaaactaacttgataaatttggttacataaactttttaaactcctgattttgtaagccattaaacagttttttactagactagaagaaaataattgcaatacttaaaatagacaaaaggtttatatccctgatatgaaaagtttatgaaattaataataaaaagacgactataaaacagataaaggacacaaagggcaattaacagaagagattatacaaatgaacaatagcatgttacaagacaacagtgttgggataatgcaaattaaaattcatcagtttagcaaatgtttaaaatgttggtaccagtagtctaattttgatgacactataaattgctacaatgattttgagaattaacctgacagttactgctgacattttaatctggatgcccttggatgccacttctggaaaaggccagggatcataatcaaaacattaagttactcttacatcacaagcatgccctgatcagaacagacactgaccacaataaccaacaagactgtagcatacttaaaaatagatgtatacgagtatgctccttgtacaattgtttatgttagcaaacaaacaagcaaacctggaaacaatccaaagtttcatctatagggagaagaataactaaattatgaaggatcatcaatctggaaccactgcagctctttaaaaaagaaaaagaaggtaaaactactattattgccctggcaggatatccactatagctgtaaaaaaaaaaaaaaaaaaaaaaagtttagaaaataaaaataaacaaaggaagtaattcaattgtagctcttcaaactgagatggtaataacagcaattacttaagtacagtgtaattatgtcttcctgggggttggttacatcttggcaaagtttatcacagcaagaattggttttggcttctggggttggagccttagattggagatagaaaaaaaacctcaaaggaagcattcctgtccagaaggtaaagtgattcccacccccctcttccctgctacaaaaggtcatggctttggggggcactgaggtctggcatcaacccttaagtttatttttcccataaggaaaagcacaggagtctcatgctagcactttagagaaccaagcatgtggatctacagttccagggaagtccctgactcggggacacccttctcctgaaatccccacactcagtcagggccctgtcatgtgttcccatggcccccagttctcttcttggtggcacataccacacgggtcatttatgttaggatatgtacctctttttccctccatgagactctcagggggtcaccatcatccccagcacctagacagtgcccagagctttgcatatacagggtaaatatttaccacgaataaatgaaattagtaaggggctacaagaacccaagatgattgaagagatataccaagaaatgatcaaatgacagccagagtgtcagtcactcagctggttccaaatgcctaataaaaattaactccctctgtccttaccacagccctatgaggtggccacacttattgtgctcactttatgatggggaaacaggagcatagaagttgggcaactttccaaagtcacaccgtgagcgattccacaacaaggggttgaacccaggctgtctgggtccagaggtcttgttcttaaccacagtgggctgctgcctcttctccctaagctagtgcatcctggaggtcctcagaatgacttgaactggccagagggtaaacgtctgctgaaggaatgaatgggcaatgaatttctaggaacctggggccctggggtctgggaaggccgttgcctccccaagggaatgacacagggccagtctgctctccttctgtgtgggcccctggacactggtctggcattgtccagacaccaaagcacatccgcatagcatgcatcaaacaaatggtgacctgctaatgaggaaatggctaaaacaggaagccatgaccagagtacatgcttcatgcctccagccccgcattgggtaatggaagggcaattacttctccacctcttcacctatacagggcagacttgcctagaagttcagagtccttcctgccaatttggcatcctttcttccagagtgttcccaggctaggtggggatgggaaaagccacaaggagcacagcaggatgatagagatgtggccaatgggcaatgctggcactgccaccctggccagaagagctcactgtgggacactttctcattgtttactagggaagaggaggttggtttggaattcattttgatttgttgttgtaaattctctttgctgtcccaatttaaacaaaaaagaaaatggagaaggggagtttttaatcaaatggattttcacttgggttttatcatgaacctggaactgctttgaaagctgaagccagctgggcttctgggtcgggtggggacttggagagcttttctgtctagctggaggattgtaaatgcaccaatcagtgctctgtgtctagctagaggattgtaaatgcatcaatcagcattctgtaaaaatggaccaattggcactctgtaaaatggaccaatcagcagcactctgtaaaacggaccaatcagcaggacatgggcggggccaaacaagggaataaaagctggccacctgctccagcagtggcaaccagtccctttctgcactgtgggtgttttgttcttttgctcttcataatgaatcttgctgctgctcagtgtttgggtccgcgccacgtttaagagctgtaacactcaaggggagggtctgcatcttcactcctgaagtcagggagaccatgaacgcacctgaaggagcaaattccagacgcccacctttaagagctgtaacactcactgtgaggtccacagcttcattcttgaagtcaccaagaccgagaacccaccagaaggaataaattcctgacacagcttgattttgtctttggtgagaattaagaagggtcacatccactgatgaccagttgggggatagatttacactggctatgcccagtggtactcaaagagccacaattactctcactgtggagcttccttcagtgacaccagagaccaggaagggagctacctaggagacctcagcctgtggaaatcaaactgtggtgtgagccctcctgttagcgagcagtggtgctggctgctttctcacactgccacttggcaaccagaatacagggacttcaccgtgagtttgagctaaaacttgcctgctagtgaatcttagcataggtaattttgggttaggagaattttggtttctctgatgacttggttgacatctttgagattcagcaagccccaattcagattagacttaaaacttatcagtgcaagtcagacagcagtgattactctgcttgttgagacctagggacatccgtttgaattcagtccgcaccccatggacgagcccagctcaatgccaggaagtttatgaattcctggggccttctagtctcatggttacatctgctgccaaaaaccagatcctatgaagttagttcagtttagtgatcttctcaccaagctgcaggggccatcctgttttgtaccatggtgatgaggcacagagcacaccctctttttaccttcaaagaaagaagccagacattgatacaggttactgtgtatgcagcagactatcctgaaggtttagggagacagagtattgatatctcagatctgcaaacaacagaacagccccttggggatcactatgatccaggcagaaggcagaatttgttttttaatcaaatcaccaattaatgactgaaaacagtatctcctggaacaagaaattattattcctctaggcttgaaacaatatgaaacagaggaaagttatttgcaaaaattggctgaatgtgcaaattatgcttccacgtgaatagcaaagtaattaaaaccattttcagaaagtgaactactttcttaaaacagcatgccgaaagtggtccagagttcaagattttgaaaacaaaaacaaagttggtacttgaattcacagattgaagctaactagaagtcaaagaaaagacacactggattatgagaaggagcagggatcacagccaggtgcagaacaaagtctgagcgtgcctgaccttccctggaggttccgcccatgtcacctgcccactgggtgtttcctgttttgaccatgcattccttagaccttctgttgttaaaattttttctccttgagaactttaactggccagaaattagaatccaattttgaaaataccaagctactttcattatgacactgcagttaagcaaatattacccaaatttggacagccttgtccaaatttgttttatattgttttatatttagcaatataaagcaaagtgtcccatttaaaaattggtaaaaccttataatcaatatgcattaaaaatttttagtatcacatcattattaatggcaaaaatttccatttataaataacagaacttttgttgattgtatttattcttccatcctgggatttggggttttttcaattttgttttttaagtttgtttttaattttttttttttaattcagaaagagaccttgttgccaccctctgcatactcagaaaggaaccccagtccgtgcagaaaggggccacggacagtggctgtccacccaggatgggcccaagaaaggagtcgatgtcctgaaacagtccctgcccctttcctgagtgttgggggatggtgggaacgacgaccatgtagctcctaacaaagggcgtctgcctctgggggtgtcctggggcgtggcttactgagggcttactgaattttaaaaattcagatttcagccaggcacggtagctcacacctgtaatcccagcactttgggaggccaaggtgggcggatcacctgaggtcaggagtttgaaaccagcctggtcaacatagtgaaaccccatctctactaaaaatacaaaaaaattagttgggtgtggtggcatataattgctgtaatcccagctactcgagaggctgaggcaggagaatcgcttgaacctgggaggcagaggttgcagtgagccgagattgcatcattgcagttcagctgggcgacaagagcaagactctgtctcaaaaaaaaaaaaaaaaaaaaaaaaaaattcagatgtccagcttttcatgaaaaaatccaaagttctggtcacacgctggacaacaatagccataggtgagcacctgctgccctgggaacaggcacgtgccctccaggtggtgaatgacccacttctctcaccagcttcaattgtgtccatctaggacatttggaactcttccaggctgctgcactcaccaatggcaccttcctggcctcatgggcatttgagtttgtactcctggccaggacctaatgctgcagaccagataacttcctgggttcttgccctaaaggaggagctgaagccataagcgcagacctctaatgtggctcagagacactgtggagagagggcagtccaggcccagggtcttgacggtcccgcccctggacttattaggccccctctgcatagctcatagtggcagtgataccagacgtcacctaaaccttcccactcctgcggcacccactaccattcagcctcagggccatcctaaccttaactccaggctcctctctcacatgggactattccagctctgactttagctcccatgaagaactggctcccgagtcctggctccccatccaggacccaggttccagtcctctcaatgggctctccctgatagaggtcaccttgggtctggtggcctaccccatttcttacaacatacaccccacaccagccttgggccagccacctcctttgtgccccagaatggctgtcagggaagaccctgcctgtgtgccccaacctgtgggcaaggcaaggcctagggctctgcccaccaggaataacagacccagctagggaaaggcaggctttgagatgcacgtgtgatgttgaccctccccccgggtcaccccaatacccgtctgcctgattctctgttgccccacagggtcccagagagtgctgagctgcacatttgacaggctatgtgcccatgggtccaatgtgtccatggatgacctgaattccaaggccatcaggaaaagcctattgtgttgggcccccaggaagccaagccaggctggctaccctgggatcttcagaggagagcagcctagcttgtacagatcccctccatgggccaggccctagaaatttcacacaaaaaaattatccttttttacagcaactcatgagagagaccatgaggataccattttacagatgagaaaactgagagtgaaggaggtgatgcaaccaatgagtgacagaacatggacatgaaacatgtcttggcaactccagtacccaagatttctccatgtcagctgtcagcctgcctggctcacaaaaccttcatccccagtgtagaaaggactgatagacaagttaggggcttctctctcacagggcccttgtgtgtgcccacccttcacacacatacacccattcacacatacatacatacatctgcacacacaaacacctatggggtccacacacatgcacacaaatacacacacaaacaccctgcatatccacacatacacacaggcatattcacacatatatacgtgcacctgcatacaaacacacacatagacacaaacacccataaatatccacacacacacaaacatgcacatacacacaaatactcatacacaaacaccctacatgttcacacatacaaactcctgcactcacacaaacaccttccatatccacacatccatacatatatattcacacacacacacacacgcatgctcacacacacgagcagagcactggaccaggagcaggagctgggactctcgtcccagatctcccatcacacttctcaagccttggcttcctcatctgtgagatggggttgtgccgcctgcttcccagagtgttgcacaagcaaacatgcatgacagcccaggaagtgagaagggtgtataggaggaaagggtcctgatttttggcagaagttgcccagggagtagtgagtgctccacacctttgtatgtgctgtaccttctctctggagctcttttctcttcttctctggctggtgaactcatcctcaccttccagctccaacaaccacactttgtgttcctgatgtctccctgtagtggaattcctccaccatcctcagtgtccccagctcctgtgtgagacaggacttcctacactggagtgggacacgtgaatgaggctgcatggctcttcggagccggatgagtcccgacttctcctgccacaacccaagtcccttcacagacccacagcacagtctctcagaggtatcttttaaggccagaccctggccttccctttgacagcactgatgcaaagctcctgatgtgactaggagtttaagaaccccctaagtgcccctagctgcctggtatagacctgccagcctctgcccatcctgcttcatctgctctgaccttttgctctctggtggagtccttgccatgatggcctgggcccagtctggtctggcctagggaggcgcttttctgcccaggcatcagggcctgtcctcacgcagagttcagaacacacagaggcaccccatcactctcgaggtaggcctcacacctcgcaagtcagcctcaaaaaagcaagtatgaggcaggatcccctttctggctttgggtaggggctgcagttcctcttgccatgtggaagcttcttaaatattgtactacaatatttaaaaatattccctttgttctacataccattaatagatcaactcttctacagctctgcaatcacttctgacttggcaaagctgagcctgagctcagggaagggctctggcttcagccttgtgaagcagaaagatcgtggactctcgcacaggacccctgtttacatttctctcaagcacagcctcaccttctcagtcctgctccaaaaacaccacacaacttccagttctgagaatgcaccctgttctctcagccctgggctttccacatgctaaccccttctcagaacctcccttccttcacttcgatacctaactgatttctattctccttcaaaaccccattctaacatcacctcttctgggaagcttctctgacttctctgaggccctcccaggctatcatttccttcctgataatggctccttatagcactggccacttatatggaagtggtgcatttgagtctctcccactgcaccatgggttttcaatggaagagtgtgtgtatcattcctctttgtaatcccagctctgtcatcacaagatggaattcaagcatgtacctggtagttgatcaagctctatattcatagagcccaaacccaaacctaaaccaagaagaaagaagaaaataatagaggctagtctagaaataacatagaccaggctaattccttaataataaagacaatagagaaaatacttccccaacccttgctaatgccaatgggaaaaaaatagagaaatctttaaaaaccaaaattggttatttgaaaagattaacaaaattggcaaatctttaactatactgaccagaaaaaagaaagattaaaatcagaaatgaaaaagaagatattacctctaaccttcaaaaataaaaaattataagtgaatgctatgaacaattatatgtcaataaattaaatgacttagatgaactggagaaattcctagaaaaacacagaaaccaaacctgactaaagaagaaatagaaagtctaaagaaacctttaacaactaaagagatgaaattagtaatccaacacctaactgcaaaaagaaagccaagccccaatggcttcattggtgaaattaaacatttaaagaataatttgcgttttaaaaatatttgcatttaaaggagcttttaaagaaaaattattatcaattcttcacaaacttgcaaaaagttaggcataaacacttcccaactcattctatggggccattactattctgatactgaaattagacaaagacatcacaaaaaaagaacactactaatacctcttatgaatatggatacaataataacaaaatactagcaaactaaattcagcaacatataaaaaggattatacacaatgatcaagtgcagtttgtcccaggaatgcagggttggtttaacatccaaaaaatcatcaacgtaataccatattattaattgttctattaatactatattaatagaataaaagatcaaaacctcataatcatctcaatagatacagaaaaaaatgacaaaatacaaaactccttcatagtaaaaacactcagaaagaataaaagagaatttcctcaacctaataaagcgtatatactaaaaaagcagcaacaacaaaaaaaacatagataacatcacatttaatgggaaagacaacatgctttccttctaagatcacaaaagaaacaaggatgtctactcaccacttccattcaacatcatactgaaggttccaactattgcaattatataagggaaaaaaaggcacccagataggaaagaaagatgtaaaatggtctcaattggcagatgacacgatttttctatgtagaaaatcctaagcaattcacaaaaaaattaaaatatgtaaatgaattcagcaagattttagcacatgagatcagtttgcaaaaatcaattctgtttctatacactgtcaatgaacaagacaaaaatgaaattagaaaaataattccatttacaataacatcaaaaaatacttaggaataaagataacaaaagaaatccaaatggtatattccaaaaaatataaaacattgttgaaagaggtcttaaaagatcaaaataaatgaaaatacatatcatgtttttggaccagaagacttattgttaaagatagaaatatcccagagttaatctataagttcaatgcaatctctatcaaaatcccagatgacttctttgcagaaattgacaaggcaatcctcaaatttatatggaaaatcaaggaatgcagaatagccaaaataatcttgaaaaaagaaaaacgaagctggagtactcacgttttccacattcaaaacttactagaaagctacagtaatctaaacagtgtgatactagcataagaacagatcaataaaatagaactgagagtccagaaataaatccatgatctatctacatacatctattgtcaattaactttttttttgagatggaggcttgctctatggcccaggctggagtgcagtggtgctatctcagctcactgcaacctccacctccctggctcaagcaattctcttgcctcagcctcctaagtagctggaattacagacacacaccaccacacctggctaatttttgtatttttagtagatacggggttttgccatgttgcccagctggtctcaaactcctgagctaaaagtgatccgcctgccttggcctcccaaaatgctgggattacatgcatgtgagccaccaggcccaactgtattgtcaattaatttttaacaagagtgccaagaccattcaatgggggaaataataatcaaataatctcttcaacaaatggtgctggaacaactggatatccacatgcaaaagaatgaagttggactcccatcttacaccatatagaaaaattaacttaaagcgggtcaacaacctacatataagagctaaagccataaaactcttagaagaaaacataggagtatatcttcataattttagctttagcaatagagtcttagatatgataccagaagcatgaacaacaaaagaagaactagataaattagacttcataaaaatagtaaactttcgaacatcaaagaaaattaccaacaaagtaaaatcatacatctaataaaggtctggtatccaaagcatttaaagaactcttacagctcatcggcaaaaacacacaactcaattttaaaatgggcaaagacttgaatagacatttctccaaagaaaatatacaaatgccaacaagcacatgaaaagacactcaatatttttattaattagggaaatgcaaatcaaaattgcaatgaggtaccaattcacacccactgtatatatatgtaataggtggatggatatatataatatttatatataattatttataatatgtatatataataatgttattatatgataaattatataatacatatataatttattgatttgagacaggctcttgccatgttatccaggctggagtgcagtgacaccatcacagctcacagtggcctgaacctcccaggatcaagtgatcctccacctcagcttcctgagcagctaagaggtactacaggcaggcataaccatgccctactaatttcttaatttttttgtagagacaggatctcactatgttgcccaggctggtctcaaattcctggcctcaagctatcctcccaaagtgctggcattagaggcatgagccactgcacctgacttaggatggatatatttttttcaatggaaaataacaagggctaacaagaatgtagaaaaattggaaccctcagacattgttggtgagaatgtaaaatggcacaactgctgagaaaagtttggtgatttctcaaaaacttaaatatagaattatggtatgatcaagcaattccactcctaggtatatacccagaagaactgacactgactactcaaacaagtacatgtatctttatagcagcactatgaacaatagccaaaaggtggaaacaacccaaatttccataacaaatgaatggataaacaaattgtgatatacaatggaataatagccataaaaaggaatgatgtactgatacatgctggaacatggatgagctaccaatttacaggaaacacagaggacaggggacatgttgaatagcaccatgagagtgcagtcagcaaaatccagactattggaaactctacagatcaaatgacctgggtcttgggagggggtaggaaaacctgtgtattaaccaacttttaaaagatgtatttttataaaataagtgagatttaattatagggtgtagggatatacatgtgggtaataattagactatgaagcaaaggaaaggagtgtctactgtaagtcaaggtagtggtgactttggagaagagagtgaggaggtgcctctggacaaagttctgtttcttagtctaggtggtggttacaaagctttactcttgtaaaaatccattaagccatgcatttgttttatgtggcttcttatagctttgtttatttgcaaataataacctggttcagagattctgattcacagggtgtggggcagagttcaggaatgcttttaaattttcccgtgttgtgtgcgcacacacacacacgcatacatatatatctgtcttccacaccaggctggtgcctgtttgaggaaggtctgtggcttgcctcaatttggacttcccaacctccagaactataagaaataaatttctgttctttatgaattacccagcctcaggtattcttttatagcaacacaaaacaaaccaagacagcttctatctctctcctactgacctatgagcagggcatgctttgtttctgtctttgcattcagcacctagcacacagtaagtgctctgtaaatgctgatgaggctgggctgatacacaggtggactgacagtgggcataccagacaagatccagtggcccctgaagcagtcaactcacccacagcaatgctggagggctatgaacttcccaatctcactgaggaccacaggagcattccacctctactgggcagtaaaatccagaacgccggctgcagacattccacttagagtcatgccaacatcctctctgggccccactagcttaagacagagccacagacacaggcgtccagaattaagagtccatctcagccctgaggctgatttctcactacacactgaccctgagaaaaacttcagggactgcaaaaggcagccagaaacactgggagaagggagggaagaaagcgcctctgaaatagacagaaacactaatgcaccaccagtgcctctttcagacataagccagtccagctccccatgggcaggcccaggatcacacaggacactacaaaccaggtctctgcccaagaaccaggctgtaggggccaccagagcctcactggaacaggttaatgcagaatacagtcatgtacgtccaaacggagctacaggccttccccgttaaagacagtgccctccccggggtagaaaggaaaacaatactccttatcagcatgaccattgtatgttaagtcttgtgatgcatgtttgcaagttactccaagtaactatggatcttgtccccaactcaggccagccagctgacaggccctgaagtcagcagctacagttggctgattctgaacccagtgatgcctgctgtttgcagggaatgagatacttacttaattatctcaaatttaaacactcttatatgtttccttaatttaaaaaccatacacacacagaagtgaggacatctaaaaatgggatctgcgttactgatgtgtaagccagaaaaaaagaggagttctcaaatacactctgagctggacttcacagctacgccagttcctcaagtggttcgtggaggtgagcggcagatgcaggccagtcttagaatgtgaaaaatctgagagctataagacaattcaaaaacagacaataagtcaaatcccattgaattgtgttattttaaatataaagaaagaaatgtacaaacatttaacagaaaattagattccccctgtccccacaaatcaaatccaaaattacccatgtgaaaacttcacggcattatccactttccaccaaggcctccacgtgctcgttctctggccaggccttggtagtgtggactggtcaccatgtaaggacagccttctgtgagctgcagaccaagggaggtggcctggcagcctgttggaggccaggcaaggataaaatttactatcaatccttttttttttttttttgagatggagtcttgctctgttgcccaggctggagtgcagtggtgtgatctcggctcactgcaacctctgcctcctgggtcaagcaattctcctgcctcagcctcccaagtagctgggactacaggtgcatgccaccacacccagctaatttttgtgtatttttagtagagacagggtttcaccatgttggccaggatggtctcaatctcttgacctcgtgatctgcccaccttggcctcccaaagtgctgggattacaggcatgagccaccatgcccagccatcaatccctttttatgtataagaaataggctcagagaggccagatggcatggcccagtttgcacagtaaggtgattgcctgtcacggccaaatagccaccacgtccggataatccatggccactggtttctgtgaggtggtggagaggcggcctcagcctgagccctctggatcgtgggcaacgggtggtgtgaggaaactgtccagcagtgatctactgtccctgcactcccacactgcagggccaggggtgcatctgcatcccacgcggggaatgcctgggcatgaggcttcaagaagcacttagcaggaatgcaccgggtgctcagaggagccgctgtcctggcaggctttgctgtccacatttgcccctttgcacggagcctgctgtccctgaagtgctctgacctgtccacaggaaaccaggtcaggcacaaaataaccacccttgtctcaaagcaagggccctaatgcctccattccttcaatgccttttccttcagccaaggtcccctgcagtcttgtcctgggcactgaactgggtgctggggatgggctggattatgaggaaggaaggtctctgctctcaagaagaagtgggtcccccatcctagggcagaaggcactgccatcctgagtcagcttatcgcagctcagatttcactccctctgtgctgggccctgggaatggggagatgacactgccatggccctgccctcaggggctccccatcacgtggggaagccagacacaaaggtaaatttgggaggaagcccccaatgcctcataagctatcaaaaaccagagtccacagcaatgggaaaaacaaggcaaggaaggtaacctgcaaagaaacgagggctggggaggcaacacgcaaacagccagaggagactgtgaggaggccccccacagactcatcgcctcaaagcggagccccaggaatgaacagtcagctctaggacgtgctaaatgccccaggagaggcacgaaccaggggaccactgacaccactcggccttcggaggtgagaggcggcttcccagaggagggcatattggctgagcaggatttcctcaggtagacacagggggaaaccaagcatcgcaactgaaggccaggtaacacagatctgccgaaagagacatcatgattttcaaacaagcaaacgaaagggattcattctattctgcaactgtcaggcatactcagaccaagagtaatctttcaaataaaccccagaaaatgaaatcacgtatgccatgttctagccccgcagtggaaagtggtttagcctctggtcccggagtcttgcctgtctcttctcccacccacctcccctgcctctctccccttcccagctgcccagaaggtgactaactgcatgtccacttttttttctgctgattcttcccatttctgatattaagtagcactttctctgcaagcaaagctacactgatataatacagatgaaactgggaaagtccaggctaaatttcaggatacgtatacagaaatgcgttgagatacagcacctcactcagcaaccatgccttatagatagtgctaagcttcagtcgcatcacagaactttctaccctgcatgagttctctgacctggctgtgagcttcttgtgggtggggtctcagtcattcccaagcagccagatgtgtctcagtgcctggcatacagaaggcatatgataaatgtttgctgaatgagtaattcacaagtaggtccattgttataaatgaatgttttggaaacacaagctgtcactgagttccacgtgtcgtgttctgctttcgaatgacctgccctgaatatatctcacatgcagtcttgcatatgcctgattcagacttttgctcacagctacggggaggtgttgagctctgcatgggccagcagatccaggcagaaagacttccatgtctgtacagcagcatttgttcattgctccaatggtttattttcccctggttttattaaaatagtgaaaaacactaaagtggaagggcttacactcaagagcaacacaattggaatgacagcatgggttttcaggggtgcccaaagaagtccttcccctctgttgtatgtccctaggtcttaagccactacactgaattcatgtgtgaaggaaaggaacaaaattcaagggtgtgtatgaaatgctagcaatatagccttgaatgctgtacctggatgtagagcaggaagcaaggcttgtaccgtctcttccttacctctctgagaagggaccccaccccaaattgatctgctctggctccgacacaccccctacatacgacccactctgtggaggcaatagggaagtcctgctctgtgtctgaaaatgtcaaagacagcttattcctgggaagccatcaaatacgccctgctctgctgtatatattattcaagtactcagtaaaccctttgtttctggagagcaaaggccactggcagcccaacctctgcccagacaaggaggggacaggcagggagctggcaagggcacacaggatcatggccagagggtgagctcagtgcccagaatctgtccccataggagcacagggtccccaggctttcaattctccagacttcgtttcccagcctataaaatgcgtacaaaactgacatcctctcgggatgttaagattcgatgatattacaaatgtgaaagcactttggaacccataaagtgctgtatcaatactggttgatcgtgctcttattaagattattctattaataacccatctcaaattacatatctgtagacagtgcgtttgtgcatctattgggccagctgctctccaggccgggaagccagaaagatctcatggaggagctggtcctcctacttccttcccttgctaaggccaaacctgcccgaatgagcttcatctagagggcacctctcaggctcagcacctggagcagccctccatgtggacagccgggcctgtccagcccaaccagagggggccgtggattttgtccatggctgtttcccagactccatggcagtgatttagatgcccctgccccctggccgcacgctggaacatgtgcacctggtttctcccggcactgacctacttatccatcagttactcaactgtctactgacgtgtttattgagcatgtcccaaaggccaggtaccagaccacttgctgcatgtgacatgcagacacatatggaaccaggccagcccttgaacaatcacgacaagtgtcccaagtgctacaaaagagaaggaagggatgatgttgcagaaagtggggagggaggggcagtgctaacctgctctggggtctctctcgaaatttccttttgtttgtcctgctgacctttctatgcatgcttttactctgaagtcacaccttttcttaacctgtagaaaattctcggtcatgtcattctaccactccttctactgtatcttctctaccattctctccacattttctccttcagaacattggttgttaaaactcagccattttttaagttctcttccatagtttcatctccttctatctgtgagctgcttttagttttccattcgcaaattgtatctttgactagctcatctattgatttaattatcatagtttttatacctagatttctactcagttttttttcagagccaatctgttcttaatttataccttcctgggtttattttataattactttttatgaatgctatttcttcttctttgtgggtcttaagatgcttaaggctttttggttttgagatttttctcatatttccatttatttggcagtgaattcnnnnnnnnnnnnnnnnnnnnnnnnnnnnnnnnnnnnnnnnnnnnnnnnnnnnnnnnnnnnnnnnnnnnnnnnnnnnnnnnnnnnnnnnnnnnnnnnnnnnnnnnnnnnnnnnnnnnnnnnnnnnnnnnnnnnnnnnnnnnnnnnnnnnnnnnnnnnnnnnnnnnnnnnnnnnnnnnnnnnnnnnnnnnnnnnnnnnnnnnnnnnnnnnnnnnnnnnnnnnnnnnnnnnnnnnnnnnnnnnnnnnnnnnnnnnnnnnnnnnnnnnnnnnnnnnnnnnnnnnnnnnnnnnnnnnnnnnnnnnnnnnnnnnnnnnnnnnnnnnnnnnnnnnnnnnnnnnnnnnnnnnnnnnnnnnnnnnnnnnnnnnnnnnnnnnnnnnnnnnnnnnnnnnnnnnnnnnnnnnnnnnnnnnnnnnnnnnnnnnnnnnnnnnnnnnnnnnnnnnnnnnnnnnnnnnnnnnnnnnnnnnnnnnnnnnnnnnnnnnnnnnnnnnnnnnnnnnnnnnnnnnnnnnnnnnnnnnnnnnnnnnnnnnnnnnnnnnnnnnnnnnnnnnnnnnnnnnnnnnnnnnnnnnnnnnnnnnnnnnnnnnnnnnnnnnnnnnnnnnnnnnnnnnnnnnnnnnnnnnnnnnnnnnnnnnnnnnnnnnnnnnnnnnnnnnnnnnnnnnnnnnnnnnnnnnnnnnnnnnnnnnnnnnnnnnnnnnnnnnnnnnnnnnnnnnnnnnnnnnnnnnnnnnnnnnnnnnnnnnnnnnnnnnnnnnnnnnnnnnnnnnnnnnnnnnnnnnnnnnnnnnnnnnnnnnnnnnnnnnnnnnnnnnnnnnnnnnnnnnnnnnnnnnnnnnnnnnnnnnnnnnnnnnnnnnnnnnnnnnnnnnnnnnnnnnnnnnnnnnnnnnnnnnnnnnnnnnnnnnnnnnnnnnnnnnnnnnnnnnnnnnnnnnnnnnnnnnnnnnnnnnnnnnnnnnnnnnnnnnnnnnnnnnnnnnnnnnnnnnnnnnnnnnnnnnnnnnnnnnnnnnnnnnnnnnnnnnnnnnnnnnnnnnnnnnnnnnnnnnnnnnnnnnnnnnnnnnnnnnnnnnnnnnnnnnnnnnnnnnnnnnnnnnnnnnnnnnnnnnnnnnnnnnnnnnnnnnnnnnnnnnnnnnnnnnnnnnnnnnnnnnnnnnnnnnnnnnnnnnnnnnnnnnnnnnnnnnnnnnnnnnnnnnnnnnnnnnnnnnnnnnnnnnnnnnnnnnnnnnnnnnnnnnnnnnnnnnnnnnnnnnnnnnnnnnnnnnnnnnnnnnnnnnnnnnnnnnnnnnnnnnnnnnnnnnnnnnnnnnnnnnnnnnnnnnnnnnnnnnnnnnnnnnnnnnnnnnnnnnnnnnnnnnnnnnnnnnnnnnnnnnnnnnnnnnnnnnnnnnnnnnnnnnnnnnnnnnnnnnnnnnnnnnnnnnnnnnnnnnnnnnnnnnnnnnnnnnnnnnnnnnnnnnnnnnnnnnnnnnnnnnnnnnnnnnnnnnnnnnnnnnnnnnnnnnnnnnnnnnnnnnnnnnnnnnnnnnnnnnnnnnnnnnnnnnnnnnnnnnnnnnnnnnnnnnnnnnnnnnnnnnnnnnnnnnnnnnnnnnnnnnnnnnnnnnnnnnnnnnnnnnnnnnnnnnnnnnnnnnnnnnnnnnnnnnnnnnnnnnnnnnnnnnnnnnnnnnnnnnnnnnnnnnnnnnnnnnnnnnnnnnnnnnnnnnnnnnnnnnnnnnnnnnnnnnnnnnnnnnnnnnnnnnnnnnnnnnnnnnnnnnnnnnnnnnnnnnnnnnnnnnnnnnnnnnnnnnnnnnnnnnnnnnnnnnnnnnnnnnnnnnnnnnnnnnnnnnnnnnnnnnnnnnnnnnnnnnnnnnnnnnnnnnnnnnnnnnnnnnnnnnnnnnnnnnnnnnnnnnnnnnnnnnnnnnnnnnnnnnnnnnnnnnnnnnnnnnnnnnnnnnnnnnnnnnnnnnnnnnnnnnnnnnnnnnnnnnnnnnnnnnnnnnnnnnnnnnnnnnnnnnnnnnnnnnnnnnnnnnnnnnnnnnnnnnnnnnnnnnnnnnnnnnnnnnnnnnnnnnnnnnnnnnnnnnnnnnnnnnnnnnnnnnnnnnnnnnnnnnnnnnnnnnnnnnnnnnnnnnnnnnnnnnnnnnnnnnnnnnnnnnnnnnnnnnnnnnnnnnnnnnnnnnnnnnnnnnnnnnnnnnnnnnnnnnnnnnnnnnnnnnnnnnnnnnnnnnnnnnnnnnnnnnnnnnnnnnnnnnnnnnnnnnnnnnnnnnnnnnnnnnnnnnnnnnnnnnnnnnnnnnnnnnnnnnnnnnnnnnnnnnnnnnnnnnnnnnnnnnnnnnnnnnnnnnnnnnnnnnnnnnnnnnnnnnnnnnnnnnnnnnnnnnnnnnnnnnnnnnnnnnnnnnnnnnnnnnnnnnnnnnnnnnnnnnnnnnnnnnnnnnnnnnnnnnnnnnnnnnnnnnnnnnnnnnnnnnnnnnnnnnnnnnnnnnnnnnnnnnnnnnnnnnnnnnnnnnnnnnnnnnnnnnnnnnnnnnnnnnnnnnnnnnnnnnnnnnnnnnnnnnnnnnnnnnnnnnnnnnnnnnnnnnnnnnnnnnnnnnnnnnnnnnnnnnnnnnnnnnnnnnnnnnnnnnnnnnnnnnnnnnnnnnnnnnnnnnnnnnnnnnnnnnnnnnnnnnnnnnnnnnnnnnnnnnnnnnnnnnnnnnnnnnnnnnnnnnnnnnnnnnnnnnnnnnnnnnnnnnnnnnnnnnnnnnnnnnnnnnnnnnnnnnnnnnnnnnnnnnnnnnnnnnnnnnnnnnnnnnnnnnnnnnnnnnnnnnnnnnnnnnnnnnnnnnnnnnnnnnnnnnnnnnnnnnnnnnnnnnnnnnnnnnnnnnnnnnnnnnnnnnnnnnnnnnnnnnnnnnnnnnnnnnnnnnnnnnnnnnnnnnnnnnnnnnnnnnnnnnnnnnnnnnnnnnnnnnnnnnnnnnnnnnnnnnnnnnnnnnnnnnnnnnnnnnnnnnnnnnnnnnnnnnnnnnnnnnnnnnnnnnnnnnnnnnnnnnnnnnnnnnnnnnnnnnnnnnnnnnnnnnnnnnnnnnnnnnnnnnnnnnnnnnnnnnnnnnnnnnnnnnnnnnnnnnnnnnnnnnnnnnnnnnnnnnnnnnnnnnnnnnnnnnnnnnnnnnnnnnnnnnnnnnnnnnnnnnnnnnnnnnnnnnnnnnnnnnnnnnnnnnnnnnnnnnnnnnnnnnnnnnnnnnnnnnnnnnnnnnnnnnnnnnnnnnnnnnnnnnnnnnnnnnnnnnnnnnnnnnnnnnnnnnnnnnnnnnnnnnnnnnnnnnnnnnnnnnnnnnnnnnnnnnnnnnnnnnnnnnnnnnnnnnnnnnnnnnnnnnnnnnnnnnnnnnnnnnnnnnnnnnnnnnnnnnnnnnnnnnnnnnnnnnnnnnnnnnnnnnnnnnnnnnnnnnnnnnnnnnnnnnnnnnnnnnnnnnnnnnnnnnnnnnnnnnnnnnnnnnnnnnnnnnnnnnnnnnnnnnnnnnnnnnnnnnnnnnnnnnnnnnnnnnnnnnnnnnnnnnnnnnnnnnnnnnnnnnnnnnnnnnnnnnnnnnnnnnnnnnnnnnnnnnnnnnnnnnnnnnnnnnnnnnnnnnnnnnnnnnnnnnnnnnnnnnnnnnnnnnnnnnnnnnnnnnnnnnnnnnnnnnnnnnnnnnnnnnnnnnnnnnnnnnnnnnnnnnnnnnnnnnnnnnnnnnnnnnnnnnnnnnnnnnnnnnnnnnnnnnnnnnnnnnnnnnnnnnnnnnnnnnnnnnnnnnnnnnnnnnnnnnnnnnnnnnnnnnnnnnnnnnnnnnnnnnnnnnnnnnnnnnnnnnnnnnnnnnnnnnnnnnnnnnnnnnnnnnnnnnnnnnnnnnnnnnnnnnnnnnnnnnnnnnnnnnnnnnnnnnnnnnnnnnnnnnnnnnnnnnnnnnnnnnnnnnnnnnnnnnnnnnnnnnnnnnnnnnnnnnnnnnnnnnnnnnnnnnnnnnnnnnnnnnnnnnnnnnnnnnnnnnnnnnnnnnnnnnnnnnnnnnnnnnnnnnnnnnnnnnnnnnnnnnnnnnnnnnnnnnnnnnnnnnnnnnnnnnnnnnnnnnnnnnnnnnnnnnnnnnnnnnnnnnnnnnnnnnnnnnnnnnnnnnnnnnnnnnnnnnnnnnnnnnnnnnnnnnnnnnnnnnnnnnnnnnnnnnnnnnnnnnnnnnnnnnnnnnnnnnnnnnnnnnnnnnnnnnnnnnnnnnnnnnnnnnnnnnnnnnnnnnnnnnnnnnnnnnnnnnnnnnnnnnnnnnnnnnnnnnnnnnnnnnnnnnnnnnnnnnnnnnnnnnnnnnnnnnnnnnnnnnnnnnnnnnnnnnnnnnnnnnnnnnnnnnnnnnnnnnnnnnnnnnnnnnnnnnnnnnnnnnnnnnnnnnnnnnnnnnnnnnnnnnnnnnnnnnnnnnnnnnnnnnnnnnnnnnnnnnnnnnnnnnnnnnnnnnnnnnnnnnnnnnnnnnnnnnnnnnnnnnnnnnnnnnnnnnnnnnnnnnnnnnnnnnnnnnnnnnnnnnnnnnnnnnnnnnnnnnnnnnnnnnnnnnnnnnnnnnnnnnnnnnnnnnnnnnnnnnnnnnnnnnnnnnnnnnnnnnnnnnnnnnnnnnnnnnnnnnnnnnnnnnnnnnnnnnnnnnnnnnnnnnnnnnnnnnnnnnnnnnnnnnnnnnnnnnnnnnnnnnnnnnnnnnnnnnnnnnnnnnnnnnnnnnnnnnnnnnnnnnnnnnnnnnnnnnnnnnnnnnnnnnnnnnnnnnnnnnnnnnnnnnnnnnnnnnnnnnnnnnnnnnnnnnnnnnnnnnnnnnnnnnnnnnnnnnnnnnnnnnnnnnnnnnnnnnnnnnnnnnnnnnnnnnnnnnnnnnnnnnnnnnnnnnnnnnnnnnnnnnnnnnnnnnnnnnnnnnnnnnnnnnnnnnnnnnnnnnnnnnnnnnnnnnnnnnnnnnnnnnnnnnnnnnnnnnnnnnnnnnnnnnnnnnnnnnnnnnnnnnnnnnnnnnnnnnnnnnnnnnnnnnnnnnnnnnnnnnnnnnnnnnnnnnnnnnnnnnnnnnnnnnnnnnnnnnnnnnnnnnnnnnnnnnnnnnnnnnnnnnnnnnnnnnnnnnnnnnnnnnnnnnnnnnnnnnnnnnnnnnnnnnnnnnnnnnnnnnnnnnnnnnnnnnnnnnnnnnnnnnnnnnnnnnnnnnnnnnnnnnnnnnnnnnnnnnnnnnnnnnnnnnnnnnnnnnnnnnnnnnnnnnnnnnnnnnnnnnnnnnnnnnnnnnnnnnnnnnnnnnnnnnnnnnnnnnnnnnnnnnnnnnnnnnnnnnnnnnnnnnnnnnnnnnnnnnnnnnnnnnnnnnnnnnnnnnnnnnnnnnnnnnnnnnnnnnnnnnnnnnnnnnnnnnnnnnnnnnnnnnnnnnnnnnnnnnnnnnnnnnnnnnnnnnnnnnnnnnnnnnnnnnnnnnnnnnnnnnnnnnnnnnnnnnnnnnnnnnnnnnnnnnnnnnnnnnnnnnnnnnnnnnnnnnnnnnnnnnnnnnnnnnnnnnnnnnnnnnnnnnnnnnnnnnnnnnnnnnnnnnnnnnnnnnnnnnnnnnnnnnnnnnnnnnnnnnnnnnnnnnnnnnnnnnnnnnnnnnnnnnnnnnnnnnnnnnnnnnnnnnnnnnnnnnnnnnnnnnnnnnnnnnnnnnnnnnnnnnnnnnnnnnnnnnnnnnnnnnnnnnnnnnnnnnnnnnnnnnnnnnnnnnnnnnnnnnnnnnnnnnnnnnnnnnnnnnnnnnnnnnnnnnnnnnnnnnnnnnnnnnnnnnnnnnnnnnnnnnnnnnnnnnnnnnnnnnnnnnnnnnnnnnnnnnnnnnnnnnnnnnnnnnnnnnnnnnnnnnnnnnnnnnnnnnnnnnnnnnnnnnnnnnnnnnnnnnnnnnnnnnnnnnnnnnnnnnnnnnnnnnnnnnnnnnnnnnnnnnnnnnnnnnnnnnnnnnnnnnnnnnnnnnnnnnnnnnnnnnnnnnnnnnnnnnnnnnnnnnnnnnnnnnnnnnnnnnnnnnnnnnnnnnnnnnnnnnnnnnnnnnnnnnnnnnnnnnnnnnnnnnnnnnnnnnnnnnnnnnnnnnnnnnnnnnnnnnnnnnnnnnnnnnnnnnnnnnnnnnnnnnnnnnnnnnnnnnnnnnnnnnnnnnnnnnnnnnnnnnnnnnnnnnnnnnnnnnnnnnnnnnnnnnnnnnnnnnnnnnnnnnnnnnnnnnnnnnnnnnnnnnnnnnnnnnnnnnnnnnnnnnnnnnnnnnnnnnnnnnnnnnnnnnnnnnnnnnnnnnnnnnnnnnnnnnnnnnnnnnnnnnnnnnnnnnnnnnnnnnnnnnnnnnnnnnnnnnnnnnnnnnnnnnnnnnnnnnnnnnnnnnnnnnnnnnnnnnnnnnnnnnnnnnnnnnnnnnnnnnnnnnnnnnnnnnnnnnnnnnnnnnnnnnnnnnnnnnnnnnnnnnnnnnnnnnnnnnnnnnnnnnnnnnnnnnnnnnnnnnnnnnnnnnnnnnnnnnnnnnnnnnnnnnnnnnnnnnnnnnnnnnnnnnnnnnnnnnnnnnnnnnnnnnnnnnnnnnnnnnnnnnnnnnnnnnnnnnnnnnnnnnnnnnnnnnnnnnnnnnnnnnnnnnnnnnnnnnnnnnnnnnnnnnnnnnnnnnnnnnnnnnnnnnnnnnnnnnnnnnnnnnnnnnnnnnnnnnnnnnnnnnnnnnnnnnnnnnnnnnnnnnnnnnnnnnnnnnnnnnnnnnnnnnnnnnnnnnnnnnnnnnnnnnnnnnnnnnnnnnnnnnnnnnnnnnnnnnnnnnnnnnnnnnnnnnnnnnnnnnnnnnnnnnnnnnnnnnnnnnnnnnnnnnnnnnnnnnnnnnnnnnnnnnnnnnnnnnnnnnnnnnnnnnnnnnnnnnnnnnnnnnnnnnnnnnnnnnnnnnnnnnnnnnnnnnnnnnnnnnnnnnnnnnnnnnnnnnnnnnnnnnnnnnnnnnnnnnnnnnnnnnnnnnnnnnnnnnnnnnnnnnnnnnnnnnnnnnnnnnnnnnnnnnnnnnnnnnnnnnnnnnnnnnnnnnnnnnnnnnnnnnnnnnnnnnnnnnnnnnnnnnnnnnnnnnnnnnnnnnnnnnnnnnnnnnnnnnnnnnnnnnnnnnnnnnnnnnnnnnnnnnnnnnnnnnnnnnnnnnnnnnnnnnnnnnnnnnnnnnnnnnnnnnnnnnnnnnnnnnnnnnnnnnnnnnnnnnnnnnnnnnnnnnnnnnnnnnnnnnnnnnnnnnnnnnnnnnnnnnnnnnnnnnnnnnnnnnnnnnnnnnnnnnnnnnnnnnnnnnnnnnnnnnnnnnnnnnnnnnnnnnnnnnnnnnnnnnnnnnnnnnnnnnnnnnnnnnnnnnnnnnnnnnnnnnnnnnnnnnnnnnnnnnnnnnnnnnnnnnnnnnnnnnnnnnnnnnnnnnnnnnnnnnnnnnnnnnnnnnnnnnnnnnnnnnnnnnnnnnnnnnnnnnnnnnnnnnnnnnnnnnnnnnnnnnnnnnnnnnnnnnnnnnnnnnnnnnnnnnnnnnnnnnnnnnnnnnnnnnnnnnnnnnnnnnnnnnnnnnnnnnnnnnnnnnnnnnnnnnnnnnnnnnnnnnnnnnnnnnnnnnnnnnnnnnnnnnnnnnnnnnnnnnnnnnnnnnnnnnnnnnnnnnnnnnnnnnnnnnnnnnnnnnnnnnnnnnnnnnnnnnnnnnnnnnnnnnnnnnnnnnnnnnnnnnnnnnnnnnnnnnnnnnnnnnnnnnnnnnnnnnnnnnnnnnnnnnnnnnnnnnnnnnnnnnnnnnnnnnnnnnnnnnnnnnnnnnnnnnnnnnnnnnnnnnnnnnnnnnnnnnnnnnnnnnnnnnnnnnnnnnnnnnnnnnnnnnnnnnnnnnnnnnnnnnnnnnnnnnnnnnnnnnnnnnnnnnnnnnnnnnnnnnnnnnnnnnnnnnnnnnnnnnnnnnnnnnnnnnnnnnnnnnnnnnnnnnnnnnnnnnnnnnnnnnnnnnnnnnnnnnnnnnnnnnnnnnnnnnnnnnnnnnnnnnnnnnnnnnnnnnnnnnnnnnnnnnnnnnnnnnnnnnnnnnnnnnnnnnnnnnnnnnnnnnnnnnnnnnnnnnnnnnnnnnnnnnnnnnnnnnnnnnnnnnnnnnnnnnnnnnnnnnnnnnnnnnnnnnnnnnnnnnnnnnnnnnnnnnnnnnnnnnnnnnnnnnnnnnnnnnnnnnnnnnnnnnnnnnnnnnnnnnnnnnnnnnnnnnnnnnnnnnnnnnnnnnnnnnnnnnnnnnnnnnnnnnnnnnnnnnnnnnnnnnnnnnnnnnnnnnnnnnnnnnnnnnnnnnnnnnnnnnnnnnnnnnnnnnnnnnnnnnnnnnnnnnnnnnnnnnnnnnnnnnnnnnnnnnnnnnnnnnnnnnnnnnnnnnnnnnnnnnnnnnnnnnnnnnnnnnnnnnnnnnnnnnnnnnnnnnnnnnnnnnnnnnnnnnnnnnnnnnnnnnnnnnnnnnnnnnnnnnnnnnnnnnnnnnnnnnnnnnnnnnnnnnnnnnnnnnnnnnnnnnnnnnnnnnnnnnnnnnnnnnnnnnnnnnnnnnnnnnnnnnnnnnnnnnnnnnnnnnnnnnnnnnnnnnnnnnnnnnnnnnnnnnnnnnnnnnnnnnnnnnnnnnnnnnnnnnnnnnnnnnnnnnnnnnnnnnnnnnnnnnnnnnnnnnnnnnnnnnnnnnnnnnnnnnnnnnnnnnnnnnnnnnnnnnnnnnnnnnnnnnnnnnnnnnnnnnnnnnnnnnnnnnnnnnnnnnnnnnnnnnnnnnnnnnnnnnnnnnnnnnnnnnnnnnnnnnnnnnnnnnnnnnnnnnnnnnnnnnnnnnnnnnnnnnnnnnnnnnnnnnnnnnnnnnnnnnnnnnnnnnnnnnnnnnnnnnnnnnnnnnnnnnnnnnnnnnnnnnnnnnnnnnnnnnnnnnnnnnnnnnnnnnnnnnnnnnnnnnnnnnnnnnnnnnnnnnnnnnnnnnnnnnnnnnnnnnnnnnnnnnnnnnnnnnnnnnnnnnnnnnnnnnnnnnnnnnnnnnnnnnnnnnnnnnnnnnnnnnnnnnnnnnnnnnnnnnnnnnnnnnnnnnnnnnnnnnnnnnnnnnnnnnnnnnnnnnnnnnnnnnnnnnnnnnnnnnnnnnnnnnnnnnnnnnnnnnnnnnnnnnnnnnnnnnnnnnnnnnnnnnnnnnnnnnnnnnnnnnnnnnnnnnnnnnnnnnnnnnnnnnnnnnnnnnnnnnnnnnnnnnnnnnnnnnnnnnnnnnnnnnnnnnnnnnnnnnnnnnnnnnnnnnnnnnnnnnnnnnnnnnnnnnnnnnnnnnnnnnnnnnnnnnnnnnnnnnnnnnnnnnnnnnnnnnnnnnnnnnnnnnnnnnnnnnnnnnnnnnnnnnnnnnnnnnnnnnnnnnnnnnnnnnnnnnnnnnnnnnnnnnnnnnnnnnnnnnnnnnnnnnnnnnnnnnnnnnnnnnnnnnnnnnnnnnnnnnnnnnnnnnnnnnnnnnnnnnnnnnnnnnnnnnnnnnnnnnnnnnnnnnnnnnnnnnnnnnnnnnnnnnnnnnnnnnnnnnnnnnnnnnnnnnnnnnnnnnnnnnnnnnnnnnnnnnnnnnnnnnnnnnnnnnnnnnnnnnnnnnnnnnnnnnnnnnnnnnnnnnnnnnnnnnnnnnnnnnnnnnnnnnnnnnnnnnnnnnnnnnnnnnnnnnnnnnnnnnnnnnnnnnnnnnnnnnnnnnnnnnnnnnnnnnnnnnnnnnnnnnnnnnnnnnnnnnnnnnnnnnnnnnnnnnnnnnnnnnnnnnnnnnnnnnnnnnnnnnnnnnnnnnnnnnnnnnnnnnnnnnnnnnnnnnnnnnnnnnnnnnnnnnnnnnnnnnnnnnnnnnnnnnnnnnnnnnnnnnnnnnnnnnnnnnnnnnnnnnnnnnnnnnnnnnnnnnnnnnnnnnnnnnnnnnnnnnnnnnnnnnnnnnnnnnnnnnnnnnnnnnnnnnnnnnnnnnnnnnnnnnnnnnnnnnnnnnnnnnnnnnnnnnnnnnnnnnnnnnnnnnnnnnnnnnnnnnnnnnnnnnnnnnnnnnnnnnnnnnnnnnnnnnnnnnnnnnnnnnnnnnnnnnnnnnnnnnnnnnnnnnnnnnnnnnnnnnnnnnnnnnnnnnnnnnnnnnnnnnnnnnnnnnnnnnnnnnnnnnnnnnnnnnnnnnnnnnnnnnnnnnnnnnnnnnnnnnnnnnnnnnnnnnnnnnnnnnnnnnnnnnnnnnnnnnnnnnnnnnnnnnnnnnnnnnnnnnnnnnnnnnnnnnnnnnnnnnnnnnnnnnnnnnnnnnnnnnnnnnnnnnnnnnnnnnnnnnnnnnnnnnnnnnnnnnnnnnnnnnnnnnnnnnnnnnnnnnnnnnnnnnnnnnnnnnnnnnnnnnnnnnnnnnnnnnnnnnnnnnnnnnnnnnnnnnnnnnnnnnnnnnnnnnnnnnnnnnnnnnnnnnnnnnnnnnnnnnnnnnnnnnnnnnnnnnnnnnnnnnnnnnnnnnnnnnnnnnnnnnnnnnnnnnnnnnnnnnnnnnnnnnnnnnnnnnnnnnnnnnnnnnnnnnnnnnnnnnnnnnnnnnnnnnnnnnnnnnnnnnnnnnnnnnnnnnnnnnnnnnnnnnnnnnnnnnnnnnnnnnnnnnnnnnnnnnnnnnnnnnnnnnnnnnnnnnnnnnnnnnnnnnnnnnnnnnnnnnnnnnnnnnnnnnnnnnnnnnnnnnnnnnnnnnnnnnnnnnnnnnnnnnnnnnnnnnnnnnnnnnnnnnnnnnnnnnnnnnnnnnnnnnnnnnnnnnnnnnnnnnnnnnnnnnnnnnnnnnnnnnnnnnnnnnnnnnnnnnnnnnnnnnnnnnnnnnnnnnnnnnnnnnnnnnnnnnnnnnnnnnnnnnnnnnnnnnnnnnnnnnnnnnnnnnnnnnnnnnnnnnnnnnnnnnnnnnnnnnnnnnnnnnnnnnnnnnnnnnnnnnnnnnnnnnnnnnnnnnnnnnnnnnnnnnnnnnnnnnnnnnnnnnnnnnnnnnnnnnnnnnnnnnnnnnnnnnnnnnnnnnnnnnnnnnnnnnnnnnnnnnnnnnnnnnnnnnnnnnnnnnnnnnnnnnnnnnnnnnnnnnnnnnnnnnnnnnnnnnnnnnnnnnnnnnnnnnnnnnnnnnnnnnnnnnnnnnnnnnnnnnnnnnnnnnnnnnnnnnnnnnnnnnnnnnnnnnnnnnnnnnnnnnnnnnnnnnnnnnnnnnnnnnnnnnnnnnnnnnnnnnnnnnnnnnnnnnnnnnnnnnnnnnnnnnnnnnnnnnnnnnnnnnnnnnnnnnnnnnnnnnnnnnnnnnnnnnnnnnnnnnnnnnnnnnnnnnnnnnnnnnnnnnnnnnnnnnnnnnnnnnnnnnnnnnnnnnnnnnnnnnnnnnnnnnnnnnnnnnnnnnnnnnnnnnnnnnnnnnnnnnnnnnnnnnnnnnnnnnnnnnnnnnnnnnnnnnnnnnnnnnnnnnnnnnnnnnnnnnnnnnnnnnnnnnnnnnnnnnnnnnnnnnnnnnnnnnnnnnnnnnnnnnnnnnnnnnnnnnnnnnnnnnnnnnnnnnnnnnnnnnnnnnnnnnnnnnnnnnnnnnnnnnnnnnnnnnnnnnnnnnnnnnnnnnnnnnnnnnnnnnnnnnnnnnnnnnnnnnnnnnnnnnnnnnnnnnnnnnnnnnnnnnnnnnnnnnnnnnnnnnnnnnnnnnnnnnnnnnnnnnnnnnnnnnnnnnnnnnnnnnnnnnnnnnnnnnnnnnnnnnnnnnnnnnnnnnnnnnnnnnnnnnnnnnnnnnnnnnnnnnnnnnnnnnnnnnnnnnnnnnnnnnnnnnnnnnnnnnnnnnnnnnnnnnnnnnnnnnnnnnnnnnnnnnnnnnnnnnnnnnnnnnnnnnnnnnnnnnnnnnnnnnnnnnnnnnnnnnnnnnnnnnnnnnnnnnnnnnnnnnnnnnnnnnnnnnnnnnnnnnnnnnnnnnnnnnnnnnnnnnnnnnnnnnnnnnnnnnnnnnnnnnnnnnnnnnnnnnnnnnnnnnnnnnnnnnnnnnnnnnnnnnnnnnnnnnnnnnnnnnnnnnnnnnnnnnnnnnnnnnnnnnnnnnnnnnnnnnnnnnnnnnnnnnnnnnnnnnnnnnnnnnnnnnnnnnnnnnnnnnnnnnnnnnnnnnnnnnnnnnnnnnnnnnnnnnnnnnnnnnnnnnnnnnnnnnnnnnnnnnnnnnnnnnnnnnnnnnnnnnnnnnnnnnnnnnnnnnnnnnnnnnnnnnnnnnnnnnnnnnnnnnnnnnnnnnnnnnnnnnnnnnnnnnnnnnnnnnnnnnnnnnnnnnnnnnnnnnnnnnnnnnnnnnnnnnnnnnnnnnnnnnnnnnnnnnnnnnnnnnnnnnnnnnnnnnnnnnnnnnnnnnnnnnnnnnnnnnnnnnnnnnnnnnnnnnnnnnnnnnnnnnnnnnnnnnnnnnnnnnnnnnnnnnnnnnnnnnnnnnnnnnnnnnnnnnnnnnnnnnnnnnnnnnnnnnnnnnnnnnnnnnnnnnnnnnnnnnnnnnnnnnnnnnnnnnnnnnnnnnnnnnnnnnnnnnnnnnnnnnnnnnnnnnnnnnnnnnnnnnnnnnnnnnnnnnnnnnnnnnnnnnnnnnnnnnnnnnnnnnnnnnnnnnnnnnnnnnnnnnnnnnnnnnnnnnnnnnnnnnnnnnnnnnnnnnnnnnnnnnnnnnnnnnnnnnnnnnnnnnnnnnnnnnnnnnnnnnnnnnnnnnnnnnnnnnnnnnnnnnnnnnnnnnnnnnnnnnnnnnnnnnnnnnnnnnnnnnnnnnnnnnnnnnnnnnnnnnnnnnnnnnnnnnnnnnnnnnnnnnnnnnnnnnnnnnnnnnnnnnnnnnnnnnnnnnnnnnnnnnnnnnnnnnnnnnnnnnnnnnnnnnnnnnnnnnnnnnnnnnnnnnnnnnnnnnnnnnnnnnnnnnnnnnnnnnnnnnnnnnnnnnnnnnnnnnnnnnnnnnnnnnnnnnnnnnnnnnnnnnnnnnnnnnnnnnnnnnnnnnnnnnnnnnnnnnnnnnnnnnnnnnnnnnnnnnnnnnnnnnnnnnnnnnnnnnnnnnnnnnnnnnnnnnnnnnnnnnnnnnnnnnnnnnnnnnnnnnnnnnnnnnnnnnnnnnnnnnnnnnnnnnnnnnnnnnnnnnnnnnnnnnnnnnnnnnnnnnnnnnnnnnnnnnnnnnnnnnnnnnnnnnnnnnnnnnnnnnnnnnnnnnnnnnnnnnnnnnnnnnnnnnnnnnnnnnnnnnnnnnnnnnnnnnnnnnnnnnnnnnnnnnnnnnnnnnnnnnnnnnnnnnnnnnnnnnnnnnnnnnnnnnnnnnnnnnnnnnnnnnnnnnnnnnnnnnnnnnnnnnnnnnnnnnnnnnnnnnnnnnnnnnnnnnnnnnnnnnnnnnnnnnnnnnnnnnnnnnnnnnnnnnnnnnnnnnnnnnnnnnnnnnnnnnnnnnnnnnnnnnnnnnnnnnnnnnnnnnnnnnnnnnnnnnnnnnnnnnnnnnnnnnnnnnnnnnnnnnnnnnnnnnnnnnnnnnnnnnnnnnnnnnnnnnnnnnnnnnnnnnnnnnnnnnnnnnnnnnnnnnnnnnnnnnnnnnnnnnnnnnnnnnnnnnnnnnnnnnnnnnnnnnnnnnnnnnnnnnnnnnnnnnnnnnnnnnnnnnnnnnnnnnnnnnnnnnnnnnnnnnnnnnnnnnnnnnnnnnnnnnnnnnnnnnnnnnnnnnnnnnnnnnnnnnnnnnnnnnnnnnnnnnnnnnnnnnnnnnnnnnnnnnnnnnnnnnnnnnnnnnnnnnnnnnnnnnnnnnnnnnnnnnnnnnnnnnnnnnnnnnnnnnnnnnnnnnnnnnnnnnnnnnnnnnnnnnnnnnnnnnnnnnnnnnnnnnnnnnnnnnnnnnnnnnnnnnnnnnnnnnnnnnnnnnnnnnnnnnnnnnnnnnnnnnnnnnnnnnnnnnnnnnnnnnnnnnnnnnnnnnnnnnnnnnnnnnnnnnnnnnnnnnnnnnnnnnnnnnnnnnnnnnnnnnnnnnnnnnnnnnnnnnnnnnnnnnnnnnnnnnnnnnnnnnnnnnnnnnnnnnnnnnnnnnnnnnnnnnnnnnnnnnnnnnnnnnnnnnnnnnnnnnnnnnnnnnnnnnnnnnnnnnnnnnnnnnnnnnnnnnnnnnnnnnnnnnnnnnnnnnnnnnnnnnnnnnnnnnnnnnnnnnnnnnnnnnnnnnnnnnnnnnnnnnnnnnnnnnnnnnnnnnnnnnnnnnnnnnnnnnnnnnnnnnnnnnnnnnnnnnnnnnnnnnnnnnnnnnnnnnnnnnnnnnnnnnnnnnnnnnnnnnnnnnnnnnnnnnnnnnnnnnnnnnnnnnnnnnnnnnnnnnnnnnnnnnnnnnnnnnnnnnnnnnnnnnnnnnnnnnnnnnnnnnnnnnnnnnnnnnnnnnnnnnnnnnnnnnnnnnnnnnnnnnnnnnnnnnnnnnnnnnnnnnnnnnnnnnnnnnnnnnnnnnnnnnnnnnnnnnnnnnnnnnnnnnnnnnnnnnnnnnnnnnnnnnnnnnnnnnnnnnnnnnnnnnnnnnnnnnnnnnnnnnnnnnnnnnnnnnnnnnnnnnnnnnnnnnnnnnnnnnnnnnnnnnnnnnnnnnnnnnnnnnnnnnnnnnnnnnnnnnnnnnnnnnnnnnnnnnnnnnnnnnnnnnnnnnnnnnnnnnnnnnnnnnnnnnnnnnnnnnnnnnnnnnnnnnnnnnnnnnnnnnnnnnnnnnnnnnnnnnnnnnnnnnnnnnnnnnnnnnnnnnnnnnnnnnnnnnnnnnnnnnnnnnnnnnnnnnnnnnnnnnnnnnnnnnnnnnnnnnnnnnnnnnnnnnnnnnnnnnnnnnnnnnnnnnnnnnnnnnnnnnnnnnnnnnnnnnnnnnnnnnnnnnnnnnnnnnnnnnnnnnnnnnnnnnnnnnnnnnnnnnnnnnnnnnnnnnnnnnnnnnnnnnnnnnnnnnnnnnnnnnnnnnnnnnnnnnnnnnnnnnnnnnnnnnnnnnnnnnnnnnnnnnnnnnnnnnnnnnnnnnnnnnnnnnnnnnnnnnnnnnnnnnnnnnnnnnnnnnnnnnnnnnnnnnnnnnnnnnnnnnnnnnnnnnnnnnnnnnnnnnnnnnnnnnnnnnnnnnnnnnnnnnnnnnnnnnnnnnnnnnnnnnnnnnnnnnnnnnnnnnnnnnnnnnnnnnnnnnnnnnnnnnnnnnnnnnnnnnnnnnnnnnnnnnnnnnnnnnnnnnnnnnnnnnnnnnnnnnnnnnnnnnnnnnnnnnnnnnnnnnnnnnnnnnnnnnnnnnnnnnnnnnnnnnnnnnnnnnnnnnnnnnnnnnnnnnnnnnnnnnnnnnnnnnnnnnnnnnnnnnnnnnnnnnnnnnnnnnnnnnnnnnnnnnnnnnnnnnnnnnnnnnnnnnnnnnnnnnnnnnnnnnnnnnnnnnnnnnnnnnnnnnnnnnnnnnnnnnnnnnnnnnnnnnnnnnnnnnnnnnnnnnnnnnnnnnnnnnnnnnnnnnnnnnnnnnnnnnnnnnnnnnnnnnnnnnnnnnnnnnnnnnnnnnnnnnnnnnnnnnnnnnnnnnnnnnnnnnnnnnnnnnnnnnnnnnnnnnnnnnnnnnnnnnnnnnnnnnnnnnnnnnnnnnnnnnnnnnnnnnnnnnnnnnnnnnnnnnnnnnnnnnnnnnnnnnnnnnnnnnnnnnnnnnnnnnnnnnnnnnnnnnnnnnnnnnnnnnnnnnnnnnnnnnnnnnnnnnnnnnnnnnnnnnnnnnnnnnnnnnnnnnnnnnnnnnnnnnnnnnnnnnnnnnnnnnnnnnnnnnnnnnnnnnnnnnnnnnnnnnnnnnnnnnnnnnnnnnnnnnnnnnnnnnnnnnnnnnnnnnnnnnnnnnnnnnnnnnnnnnnnnnnnnnnnnnnnnnnnnnnnnnnnnnnnnnnnnnnnnnnnnnnnnnnnnnnnnnnnnnnnnnnnnnnnnnnnnnnnnnnnnnnnnnnnnnnnnnnnnnnnnnnnnnnnnnnnnnnnnnnnnnnnnnnnnnnnnnnnnnnnnnnnnnnnnnnnnnnnnnnnnnnnnnnnnnnnnnnnnnnnnnnnnnnnnnnnnnnnnnnnnnnnnnnnnnnnnnnnnnnnnnnnnnnnnnnnnnnnnnnnnnnnnnnnnnnnnnnnnnnnnnnnnnnnnnnnnnnnnnnnnnnnnnnnnnnnnnnnnnnnnnnnnnnnnnnnnnnnnnnnnnnnnnnnnnnnnnnnnnnnnnnnnnnnnnnnnnnnnnnnnnnnnnnnnnnnnnnnnnnnnnnnnnnnnnnnnnnnnnnnnnnnnnnnnnnnnnnnnnnnnnnnnnnnnnnnnnnnnnnnnnnnnnnnnnnnnnnnnnnnnnnnnnnnnnnnnnnnnnnnnnnnnnnnnnnnnnnnnnnnnnnnnnnnnnnnnnnnnnnnnnnnnnnnnnnnnnnnnnnnnnnnnnnnnnnnnnnnnnnnnnnnnnnnnnnnnnnnnnnnnnnnnnnnnnnnnnnnnnnnnnnnnnnnnnnnnnnnnnnnnnnnnnnnnnnnnnnnnnnnnnnnnnnnnnnnnnnnnnnnnnnnnnnnnnnnnnnnnnnnnnnnnnnnnnnnnnnnnnnnnnnnnnnnnnnnnnnnnnnnnnnnnnnnnnnnnnnnnnnnnnnnnnnnnnnnnnnnnnnnnnnnnnnnnnnnnnnnnnnnnnnnnnnnnnnnnnnnnnnnnnnnnnnnnnnnnnnnnnnnnnnnnnnnnnnnnnnnnnnnnnnnnnnnnnnnnnnnnnnnnnnnnnnnnnnnnnnnnnnnnnnnnnnnnnnnnnnnnnnnnnnnnnnnnnnnnnnnnnnnnnnnnnnnnnnnnnnnnnnnnnnnnnnnnnnnnnnnnnnnnnnnnnnnnnnnnnnnnnnnnnnnnnnnnnnnnnnnnnnnnnnnnnnnnnnnnnnnnnnnnnnnnnnnnnnnnnnnnnnnnnnnnnnnnnnnnnnnnnnnnnnnnnnnnnnnnnnnnnnnnnnnnnnnnnnnnnnnnnnnnnnnnnnnnnnnnnnnnnnnnnnnnnnnnnnnnnnnnnnnnnnnnnnnnnnnnnnnnnnnnnnnnnnnnnnnnnnnnnnnnnnnnnnnnnnnnnnnnnnnnnnnnnnnnnnnnnnnnnnnnnnnnnnnnnnnnnnnnnnnnnnnnnnnnnnnnnnnnnnnnnnnnnnnnnnnnnnnnnnnnnnnnnnnnnnnnnnnnnnnnnnnnnnnnnnnnnnnnnnnnnnnnnnnnnnnnnnnnnnnnnnnnnnnnnnnnnnnnnnnnnnnnnnnnnnnnnnnnnnnnnnnnnnnnnnnnnnnnnnnnnnnnnnnnnnnnnnnnnnnnnnnnnnnnnnnnnnnnnnnnnnnnnnnnnnnnnnnnnnnnnnnnnnnnnnnnnnnnnnnnnnnnnnnnnnnnnnnnnnnnnnnnnnnnnnnnnnnnnnnnnnnnnnnnnnnnnnnnnnnnnnnnnnnnnnnnnnnnnnnnnnnnnnnnnnnnnnnnnnnnnnnnnnnnnnnnnnnnnnnnnnnnnnnnnnnnnnnnnnnnnnnnnnnnnnnnnnnnnnnnnnnnnnnnnnnnnnnnnnnnnnnnnnnnnnnnnnnnnnnnnnnnnnnnnnnnnnnnnnnnnnnnnnnnnnnnnnnnnnnnnnnnnnnnnnnnnnnnnnnnnnnnnnnnnnnnnnnnnnnnnnnnnnnnnnnnnnnnnnnnnnnnnnnnnnnnnnnnnnnnnnnnnnnnnnnnnnnnnnnnnnnnnnnnnnnnnnnnnnnnnnnnnnnnnnnnnnnnnnnnnnnnnnnnnnnnnnnnnnnnnnnnnnnnnnnnnnnnnnnnnnnnnnnnnnnnnnnnnnnnnnnnnnnnnnnnnnnnnnnnnnnnnnnnnnnnnnnnnnnnnnnnnnnnnnnnnnnnnnnnnnnnnnnnnnnnnnnnnnnnnnnnnnnnnnnnnnnnnnnnnnnnnnnnnnnnnnnnnnnnnnnnnnnnnnnnnnnnnnnnnnnnnnnnnnnnnnnnnnnnnnnnnnnnnnnnnnnnnnnnnnnnnnnnnnnnnnnnnnnnnnnnnnnnnnnnnnnnnnnnnnnnnnnnnnnnnnnnnnnnnnnnnnnnnnnnnnnnnnnnnnnnnnnnnnnnnnnnnnnnnnnnnnnnnnnnnnnnnnnnnnnnnnnnnnnnnnnnnnnnnnnnnnnnnnnnnnnnnnnnnnnnnnnnnnnnnnnnnnnnnnnnnnnnnnnnnnnnnnnnnnnnnnnnnnnnnnnnnnnnnnnnnnnnnnnnnnnnnnnnnnnnnnnnnnnnnnnnnnnnnnnnnnnnnnnnnnnnnnnnnnnnnnnnnnnnnnnnnnnnnnnnnnnnnnnnnnnnnnnnnnnnnnnnnnnnnnnnnnnnnnnnnnnnnnnnnnnnnnnnnnnnnnnnnnnnnnnnnnnnnnnnnnnnnnnnnnnnnnnnnnnnnnnnnnnnnnnnnnnnnnnnnnnnnnnnnnnnnnnnnnnnnnnnnnnnnnnnnnnnnnnnnnnnnnnnnnnnnnnnnnnnnnnnnnnnnnnnnnnnnnnnnnnnnnnnnnnnnnnnnnnnnnnnnnnnnnnnnnnnnnnnnnnnnnnnnnnnnnnnnnnnnnnnnnnnnnnnnnnnnnnnnnnnnnnnnnnnnnnnnnnnnnnnnnnnnnnnnnnnnnnnnnnnnnnnnnnnnnnnnnnnnnnnnnnnnnnnnnnnnnnnnnnnnnnnnnnnnnnnnnnnnnnnnnnnnnnnnnnnnnnnnnnnnnnnnnnnnnnnnnnnnnnnnnnnnnnnnnnnnnnnnnnnnnnnnnnnnnnnnnnnnnnnnnnnnnnnnnnnnnnnnnnnnnnnnnnnnnnnnnnnnnnnnnnnnnnnnnnnnnnnnnnnnnnnnnnnnnnnnnnnnnnnnnnnnnnnnnnnnnnnnnnnnnnnnnnnnnnnnnnnnnnnnnnnnnnnnnnnnnnnnnnnnnnnnnnnnnnnnnnnnnnnnnnnnnnnnnnnnnnnnnnnnnnnnnnnnnnnnnnnnnnnnnnnnnnnnnnnnnnnnnnnnnnnnnnnnnnnnnnnnnnnnnnnnnnnnnnnnnnnnnnnnnnnnnnnnnnnnnnnnnnnnnnnnnnnnnnnnnnnnnnnnnnnnnnnnnnnnnnnnnnnnnnnnnnnnnnnnnnnnnnnnnnnnnnnnnnnnnnnnnnnnnnnnnnnnnnnnnnnnnnnnnnnnnnnnnnnnnnnnnnnnnnnnnnnnnnnnnnnnnnnnnnnnnnnnnnnnnnnnnnnnnnnnnnnnnnnnnnnnnnnnnnnnnnnnnnnnnnnnnnnnnnnnnnnnnnnnnnnnnnnnnnnnnnnnnnnnnnnnnnnnnnnnnnnnnnnnnnnnnnnnnnnnnnnnnnnnnnnnnnnnnnnnnnnnnnnnnnnnnnnnnnnnnnnnnnnnnnnnnnnnnnnnnnnnnnnnnnnnnnnnnnnnnnnnnnnnnnnnnnnnnnnnnnnnnnnnnnnnnnnnnnnnnnnnnnnnnnnnnnnnnnnnnnnnnnnnnnnnnnnnnnnnnnnnnnnnnnnnnnnnnnnnnnnnnnnnnnnnnnnnnnnnnnnnnnnnnnnnnnnnnnnnnnnnnnnnnnnnnnnnnnnnnnnnnnnnnnnnnnnnnnnnnnnnnnnnnnnnnnnnnnnnnnnnnnnnnnnnnnnnnnnnnnnnnnnnnnnnnnnnnnnnnnnnnnnnnnnnnnnnnnnnnnnnnnnnnnnnnnnnnnnnnnnnnnnnnnnnnnnnnnnnnnnnnnnnnnnnnnnnnnnnnnnnnnnnnnnnnnnnnnnnnnnnnnnnnnnnnnnnnnnnnnnnnnnnnnnnnnnnnnnnnnnnnnnnnnnnnnnnnnnnnnnnnnnnnnnnnnnnnnnnnnnnnnnnnnnnnnnnnnnnnnnnnnnnnnnnnnnnnnnnnnnnnnnnnnnnnnnnnnnnnnnnnnnnnnnnnnnnnnnnnnnnnnnnnnnnnnnnnnnnnnnnnnnnnnnnnnnnnnnnnnnnnnnnnnnnnnnnnnnnnnnnnnnnnnnnnnnnnnnnnnnnnnnnnnnnnnnnnnnnnnnnnnnnnnnnnnnnnnnnnnnnnnnnnnnnnnnnnnnnnnnnnnnnnnnnnnnnnnnnnnnnnnnnnnnnnnnnnnnnnnnnnnnnnnnnnnnnnnnnnnnnnnnnnnnnnnnnnnnnnnnnnnnnnnnnnnnnnnnnnnnnnnnnnnnnnnnnnnnnnnnnnnnnnnnnnnnnnnnnnnnnnnnnnnnnnnnnnnnnnnnnnnnnnnnnnnnnnnnnnnnnnnnnnnnnnnnnnnnnnnnnnnnnnnnnnnnnnnnnnnnnnnnnnnnnnnnnnnnnnnnnnnnnnnnnnnnnnnnnnnnnnnnnnnnnnnnnnnnnnnnnnnnnnnnnnnnnnnnnnnnnnnnnnnnnnnnnnnnnnnnnnnnnnnnnnnnnnnnnnnnnnnnnnnnnnnnnnnnnnnnnnnnnnnnnnnnnnnnnnnnnnnnnnnnnnnnnnnnnnnnnnnnnnnnnnnnnnnnnnnnnnnnnnnnnnnnnnnnnnnnnnnnnnnnnnnnnnnnnnnnnnnnnnnnnnnnnnnnnnnnnnnnnnnnnnnnnnnnnnnnnnnnnnnnnnnnnnnnnnnnnnnnnnnnnnnnnnnnnnnnnnnnnnnnnnnnnnnnnnnnnnnnnnnnnnnnnnnnnnnnnnnnnnnnnnnnnnnnnnnnnnnnnnnnnnnnnnnnnnnnnnnnnnnnnnnnnnnnnnnnnnnnnnnnnnnnnnnnnnnnnnnnnnnnnnnnnnnnnnnnnnnnnnnnnnnnnnnnnnnnnnnnnnnnnnnnnnnnnnnnnnnnnnnnnnnnnnnnnnnnnnnnnnnnnnnnnnnnnnnnnnnnnnnnnnnnnnnnnnnnnnnnnnnnnnnnnnnnnnnnnnnnnnnnnnnnnnnnnnnnnnnnnnnnnnnnnnnnnnnnnnnnnnnnnnnnnnnnnnnnnnnnnnnnnnnnnnnnnnnnnnnnnnnnnnnnnnnnnnnnnnnnnnnnnnnnnnnnnnnnnnnnnnnnnnnnnnnnnnnnnnnnnnnnnnnnnnnnnnnnnnnnnnnnnnnnnnnnnnnnnnnnnnnnnnnnnnnnnnnnnnnnnnnnnnnnnnnnnnnnnnnnnnnnnnnnnnnnnnnnnnnnnnnnnnnnnnnnnnnnnnnnnnnnnnnnnnnnnnnnnnnnnnnnnnnnnnnnnnnnnnnnnnnnnnnnnnnnnnnnnnnnnnnnnnnnnnnnnnnnnnnnnnnnnnnnnnnnnnnnnnnnnnnnnnnnnnnnnnnnnnnnnnnnnnnnnnnnnnnnnnnnnnnnnnnnnnnnnnnnnnnnnnnnnnnnnnnnnnnnnnnnnnnnnnnnnnnnnnnnnnnnnnnnnnnnnnnnnnnnnnnnnnnnnnnnnnnnnnnnnnnnnnnnnnnnnnnnnnnnnnnnnnnnnnnnnnnnnnnnnnnnnnnnnnnnnnnnnnnnnnnnnnnnnnnnnnnnnnnnnnnnnnnnnnnnnnnnnnnnnnnnnnnnnnnnnnnnnnnnnnnnnnnnnnnnnnnnnnnnnnnnnnnnnnnnnnnnnnnnnnnnnnnnnnnnnnnnnnnnnnnnnnnnnnnnnnnnnnnnnnnnnnnnnnnnnnnnnnnnnnnnnnnnnnnnnnnnnnnnnnnnnnnnnnnnnnnnnnnnnnnnnnnnnnnnnnnnnnnnnnnnnnnnnnnnnnnnnnnnnnnnnnnnnnnnnnnnnnnnnnnnnnnnnnnnnnnnnnnnnnnnnnnnnnnnnnnnnnnnnnnnnnnnnnnnnnnnnnnnnnnnnnnnnnnnnnnnnnnnnnnnnnnnnnnnnnnnnnnnnnnnnnnnnnnnnnnnnnnnnnnnnnnnnnnnnnnnnnnnnnnnnnnnnnnnnnnnnnnnnnnnnnnnnnnnnnnnnnnnnnnnnnnnnnnnnnnnnnnnnnnnnnnnnnnnnnnnnnnnnnnnnnnnnnnnnnnnnnnnnnnnnnnnnnnnnnnnnnnnnnnnnnnnnnnnnnnnnnnnnnnnnnnnnnnnnnnnnnnnnnnnnnnnnnnnnnnnnnnnnnnnnnnnnnnnnnnnnnnnnnnnnnnnnnnnnnnnnnnnnnnnnnnnnnnnnnnnnnnnnnnnnnnnnnnnnnnnnnnnnnnnnnnnnnnnnnnnnnnnnnnnnnnnnnnnnnnnnnnnnnnnnnnnnnnnnnnnnnnnnnnnnnnnnnnnnnnnnnnnnnnnnnnnnnnnnnnnnnnnnnnnnnnnnnnnnnnnnnnnnnnnnnnnnnnnnnnnnnnnnnnnnnnnnnnnnnnnnnnnnnnnnnnnnnnnnnnnnnnnnnnnnnnnnnnnnnnnnnnnnnnnnnnnnnnnnnnnnnnnnnnnnnnnnnnnnnnnnnnnnnnnnnnnnnnnnnnnnnnnnnnnnnnnnnnnnnnnnnnnnnnnnnnnnnnnnnnnnnnnnnnnnnnnnnnnnnnnnnnnnnnnnnnnnnnnnnnnnnnnnnnnnnnnnnnnnnnnnnnnnnnnnnnnnnnnnnnnnnnnnnnnnnnnnnnnnnnnnnnnnnnnnnnnnnnnnnnnnnnnnnnnnnnnnnnnnnnnnnnnnnnnnnnnnnnnnnnnnnnnnnnnnnnnnnnnnnnnnnnnnnnnnnnnnnnnnnnnnnnnnnnnnnnnnnnnnnnnnnnnnnnnnnnnnnnnnnnnnnnnnnnnnnnnnnnnnnnnnnnnnnnnnnnnnnnnnnnnnnnnnnnnnnnnnnnnnnnnnnnnnnnnnnnnnnnnnnnnnnnnnnnnnnnnnnnnnnnnnnnnnnnnnnnnnnnnnnnnnnnnnnnnnnnnnnnnnnnnnnnnnnnnnnnnnnnnnnnnnnnnnnnnnnnnnnnnnnnnnnnnnnnnnnnnnnnnnnnnnnnnnnnnnnnnnnnnnnnnnnnnnnnnnnnnnnnnnnnnnnnnnnnnnnnnnnnnnnnnnnnnnnnnnnnnnnnnnnnnnnnnnnnnnnnnnnnnnnnnnnnnnnnnnnnnnnnnnnnnnnnnnnnnnnnnnnnnnnnnnnnnnnnnnnnnnnnnnnnnnnnnnnnnnnnnnnnnnnnnnnnnnnnnnnnnnnnnnnnnnnnnnnnnnnnnnnnnnnnnnnnnnnnnnnnnnnnnnnnnnnnnnnnnnnnnnnnnnnnnnnnnnnnnnnnnnnnnnnnnnnnnnnnnnnnnnnnnnnnnnnnnnnnnnnnnnnnnnnnnnnnnnnnnnnnnnnnnnnnnnnnnnnnnnnnnnnnnnnnnnnnnnnnnnnnnnnnnnnnnnnnnnnnnnnnnnnnnnnnnnnnnnnnnnnnnnnnnnnnnnnnnnnnnnnnnnnnnnnnnnnnnnnnnnnnnnnnnnnnnnnnnnnnnnnnnnnnnnnnnnnnnnnnnnnnnnnnnnnnnnnnnnnnnnnnnnnnnnnnnnnnnnnnnnnnnnnnnnnnnnnnnnnnnnnnnnnnnnnnnnnnnnnnnnnnnnnnnnnnnnnnnnnnnnnnnnnnnnnnnnnnnnnnnnnnnnnnnnnnnnnnnnnnnnnnnnnnnnnnnnnnnnnnnnnnnnnnnnnnnnnnnnnnnnnnnnnnnnnnnnnnnnnnnnnnnnnnnnnnnnnnnnnnnnnnnnnnnnnnnnnnnnnnnnnnnnnnnnnnnnnnnnnnnnnnnnnnnnnnnnnnnnnnnnnnnnnnnnnnnnnnnnnnnnnnnnnnnnnnnnnnnnnnnnnnnnnnnnnnnnnnnnnnnnnnnnnnnnnnnnnnnnnnnnnnnnnnnnnnnnnnnnnnnnnnnnnnnnnnnnnnnnnnnnnnnnnnnnnnnnnnnnnnnnnnnnnnnnnnnnnnnnnnnnnnnnnnnnnnnnnnnnnnnnnnnnnnnnnnnnnnnnnnnnnnnnnnnnnnnnnnnnnnnnnnnnnnnnnnnnnnnnnnnnnnnnnnnnnnnnnnnnnnnnnnnnnnnnnnnnnnnnnnnnnnnnnnnnnnnnnnnnnnnnnnnnnnnnnnnnnnnnnnnnnnnnnnnnnnnnnnnnnnnnnnnnnnnnnnnnnnnnnnnnnnnnnnnnnnnnnnnnnnnnnnnnnnnnnnnnnnnnnnnnnnnnnnnnnnnnnnnnnnnnnnnnnnnnnnnnnnnnnnnnnnnnnnnnnnnnnnnnnnnnnnnnnnnnnnnnnnnnnnnnnnnnnnnnnnnnnnnnnnnnnnnnnnnnnnnnnnnnnnnnnnnnnnnnnnnnnnnnnnnnnnnnnnnnnnnnnnnnnnnnnnnnnnnnnnnnnnnnnnnnnnnnnnnnnnnnnnnnnnnnnnnnnnnnnnnnnnnnnnnnnnnnnnnnnnnnnnnnnnnnnnnnnnnnnnnnnnnnnnnnnnnnnnnnnnnnnnnnnnnnnnnnnnnnnnnnnnnnnnnnnnnnnnnnnnnnnnnnnnnnnnnnnnnnnnnnnnnnnnnnnnnnnnnnnnnnnnnnnnnnnnnnnnnnnnnnnnnnnnnnnnnnnnnnnnnnnnnnnnnnnnnnnnnnnnnnnnnnnnnnnnnnnnnnnnnnnnnnnnnnnnnnnnnnnnnnnnnnnnnnnnnnnnnnnnnnnnnnnnnnnnnnnnnnnnnnnnnnnnnnnnnnnnnnnnnnnnnnnnnnnnnnnnnnnnnnnnnnnnnnnnnnnnnnnnnnnnnnnnnnnnnnnnnnnnnnnnnnnnnnnnnnnnnnnnnnnnnnnnnnnnnnnnnnnnnnnnnnnnnnnnnnnnnnnnnnnnnnnnnnnnnnnnnnnnnnnnnnnnnnnnnnnnnnnnnnnnnnnnnnnnnnnnnnnnnnnnnnnnnnnnnnnnnnnnnnnnnnnnnnnnnnnnnnnnnnnnnnnnnnnnnnnnnnnnnnnnnnnnnnnnnnnnnnnnnnnnnnnnnnnnnnnnnnnnnnnnnnnnnnnnnnnnnnnnnnnnnnnnnnnnnnnnnnnnnnnnnnnnnnnnnnnnnnnnnnnnnnnnnnnnnnnnnnnnnnnnnnnnnnnnnnnnnnnnnnnnnnnnnnnnnnnnnnnnnnnnnnnnnnnnnnnnnnnnnnnnnnnnnnnnnnnnnnnnnnnnnnnnnnnnnnnnnnnnnnnnnnnnnnnnnnnnnnnnnnnnnnnnnnnnnnnnnnnnnnnnnnnnnnnnnnnnnnnnnnnnnnnnnnnnnnnnnnnnnnnnnnnnnnnnnnnnnnnnnnnnnnnnnnnnnnnnnnnnnnnnnnnnnnnnnnnnnnnnnnnnnnnnnnnnnnnnnnnnnnnnnnnnnnnnnnnnnnnnnnnnnnnnnnnnnnnnnnnnnnnnnnnnnnnnnnnnnnnnnnnnnnnnnnnnnnnnnnnnnnnnnnnnnnnnnnnnnnnnnnnnnnnnnnnnnnnnnnnnnnnnnnnnnnnnnnnnnnnnnnnnnnnnnnnnnnnnnnnnnnnnnnnnnnnnnnnnnnnnnnnnnnnnnnnnnnnnnnnnnnnnnnnnnnnnnnnnnnnnnnnnnnnnnnnnnnnnnnnnnnnnnnnnnnnnnnnnnnnnnnnnnnnnnnnnnnnnnnnnnnnnnnnnnnnnnnnnnnnnnnnnnnnnnnnnnnnnnnnnnnnnnnnnnnnnnnnnnnnnnnnnnnnnnnnnnnnnnnnnnnnnnnnnnnnnnnnnnnnnnnnnnnnnnnnnnnnnnnnnnnnnnnnnnnnnnnnnnnnnnnnnnnnnnnnnnnnnnnnnnnnnnnnnnnnnnnnnnnnnnnnnnnnnnnnnnnnnnnnnnnnnnnnnnnnnnnnnnnnnnnnnnnnnnnnnnnnnnnnnnnnnnnnnnnnnnnnnnnnnnnnnnnnnnnnnnnnnnnnnnnnnnnnnnnnnnnnnnnnnnnnnnnnnnnnnnnnnnnnnnnnnnnnnnnnnnnnnnnnnnnnnnnnnnnnnnnnnnnnnnnnnnnnnnnnnnnnnnnnnnnnnnnnnnnnnnnnnnnnnnnnnnnnnnnnnnnnnnnnnnnnnnnnnnnnnnnnnnnnnnnnnnnnnnnnnnnnnnnnnnnnnnnnnnnnnnnnnnnnnnnnnnnnnnnnnnnnnnnnnnnnnnnnnnnnnnnnnnnnnnnnnnnnnnnnnnnnnnnnnnnnnnnnnnnnnnnnnnnnnnnnnnnnnnnnnnnnnnnnnnnnnnnnnnnnnnnnnnnnnnnnnnnnnnnnnnnnnnnnnnnnnnnnnnnnnnnnnnnnnnnnnnnnnnnnnnnnnnnnnnnnnnnnnnnnnnnnnnnnnnnnnnnnnnnnnnnnnnnnnnnnnnnnnnnnnnnnnnnnnnnnnnnnnnnnnnnnnnnnnnnnnnnnnnnnnnnnnnnnnnnnnnnnnnnnnnnnnnnnnnnnnnnnnnnnnnnnnnnnnnnnnnnnnnnnnnnnnnnnnnnnnnnnnnnnnnnnnnnnnnnnnnnnnnnnnnnnnnnnnnnnnnnnnnnnnnnnnnnnnnnnnnnnnnnnnnnnnnnnnnnnnnnnnnnnnnnnnnnnnnnnnnnnnnnnnnnnnnnnnnnnnnnnnnnnnnnnnnnnnnnnnnnnnnnnnnnnnnnnnnnnnnnnnnnnnnnnnnnnnnnnnnnnnnnnnnnnnnnnnnnnnnnnnnnnnnnnnnnnnnnnnnnnnnnnnnnnnnnnnnnnnnnnnnnnnnnnnnnnnnnnnnnnnnnnnnnnnnnnnnnnnnnnnnnnnnnnnnnnnnnnnnnnnnnnnnnnnnnnnnnnnnnnnnnnnnnnnnnnnnnnnnnnnnnnnnnnnnnnnnnnnnnnnnnnnnnnnnnnnnnnnnnnnnnnnnnnnnnnnnnnnnnnnnnnnnnnnnnnnnnnnnnnnnnnnnnnnnnnnnnnnnnnnnnnnnnnnnnnnnnnnnnnnnnnnnnnnnnnnnnnnnnnnnnnnnnnnnnnnnnnnnnnnnnnnnnnnnnnnnnnnnnnnnnnnnnnnnnnnnnnnnnnnnnnnnnnnnnnnnnnnnnnnnnnnnnnnnnnnnnnnnnnnnnnnnnnnnnnnnnnnnnnnnnnnnnnnnnnnnnnnnnnnnnnnnnnnnnnnnnnnnnnnnnnnnnnnnnnnnnnnnnnnnnnnnnnnnnnnnnnnnnnnnnnnnnnnnnnnnnnnnnnnnnnnnnnnnnnnnnnnnnnnnnnnnnnnnnnnnnnnnnnnnnnnnnnnnnnnnnnnnnnnnnnnnnnnnnnnnnnnnnnnnnnnnnnnnnnnnnnnnnnnnnnnnnnnnnnnnnnnnnnnnnnnnnnnnnnnnnnnnnnnnnnnnnnnnnnnnnnnnnnnnnnnnnnnnnnnnnnnnnnnnnnnnnnnnnnnnnnnnnnnnnnnnnnnnnnnnnnnnnnnnnnnnnnnnnnnnnnnnnnnnnnnnnnnnnnnnnnnnnnnnnnnnnnnnnnnnnnnnnnnnnnnnnnnnnnnnnnnnnnnnnnnnnnnnnnnnnnnnnnnnnnnnnnnnnnnnnnnnnnnnnnnnnnnnnnnnnnnnnnnnnnnnnnnnnnnnnnnnnnnnnnnnnnnnnnnnnnnnnnnnnnnnnnnnnnnnnnnnnnnnnnnnnnnnnnnnnnnnnnnnnnnnnnnnnnnnnnnnnnnnnnnnnnnnnnnnnnnnnnnnnnnnnnnnnnnnnnnnnnnnnnnnnnnnnnnnnnnnnnnnnnnnnnnnnnnnnnnnnnnnnnnnnnnnnnnnnnnnnnnnnnnnnnnnnnnnnnnnnnnnnnnnnnnnnnnnnnnnnnnnnnnnnnnnnnnnnnnnnnnnnnnnnnnnnnnnnnnnnnnnnnnnnnnnnnnnnnnnnnnnnnnnnnnnnnnnnnnnnnnnnnnnnnnnnnnnnnnnnnnnnnnnnnnnnnnnnnnnnnnnnnnnnnnnnnnnnnnnnnnnnnnnnnnnnnnnnnnnnnnnnnnnnnnnnnnnnnnnnnnnnnnnnnnnnnnnnnnnnnnnnnnnnnnnnnnnnnnnnnnnnnnnnnnnnnnnnnnnnnnnnnnnnnnnnnnnnnnnnnnnnnnnnnnnnnnnnnnnnnnnnnnnnnnnnnnnnnnnnnnnnnnnnnnnnnnnnnnnnnnnnnnnnnnnnnnnnnnnnnnnnnnnnnnnnnnnnnnnnnnnnnnnnnnnnnnnnnnnnnnnnnnnnnnnnnnnnnnnnnnnnnnnnnnnnnnnnnnnnnnnnnnnnnnnnnnnnnnnnnnnnnnnnnnnnnnnnnnnnnnnnnnnnnnnnnnnnnnnnnnnnnnnnnnnnnnnnnnnnnnnnnnnnnnnnnnnnnnnnnnnnnnnnnnnnnnnnnnnnnnnnnnnnnnnnnnnnnnnnnnnnnnnnnnnnnnnnnnnnnnnnnnnnnnnnnnnnnnnnnnnnnnnnnnnnnnnnnnnnnnnnnnnnnnnnnnnnnnnnnnnnnnnnnnnnnnnnnnnnnnnnnnnnnnnnnnnnnnnnnnnnnnnnnnnnnnnnnnnnnnnnnnnnnnnnnnnnnnnnnnnnnnnnnnnnnnnnnnnnnnnnnnnnnnnnnnnnnnnnnnnnnnnnnnnnnnnnnnnnnnnnnnnnnnnnnnnnnnnnnnnnnnnnnnnnnnnnnnnnnnnnnnnnnnnnnnnnnnnnnnnnnnnnnnnnnnnnnnnnnnnnnnnnnnnnnnnnnnnnnnnnnnnnnnnnnnnnnnnnnnnnnnnnnnnnnnnnnnnnnnnnnnnnnnnnnnnnnnnnnnnnnnnnnnnnnnnnnnnnnnnnnnnnnnnnnnnnnnnnnnnnnnnnnnnnnnnnnnnnnnnnnnnnnnnnnnnnnnnnnnnnnnnnnnnnnnnnnnnnnnnnnnnnnnnnnnnnnnnnnnnnnnnnnnnnnnnnnnnnnnnnnnnnnnnnnnnnnnnnnnnnnnnnnnnnnnnnnnnnnnnnnnnnnnnnnnnnnnnnnnnnnnnnnnnnnnnnnnnnnnnnnnnnnnnnnnnnnnnnnnnnnnnnnnnnnnnnnnnnnnnnnnnnnnnnnnnnnnnnnnnnnnnnnnnnnnnnnnnnnnnnnnnnnnnnnnnnnnnnnnnnnnnnnnnnnnnnnnnnnnnnnnnnnnnnnnnnnnnnnnnnnnnnnnnnnnnnnnnnnnnnnnnnnnnnnnnnnnnnnnnnnnnnnnnnnnnnnnnnnnnnnnnnnnnnnnnnnnnnnnnnnnnnnnnnnnnnnnnnnnnnnnnnnnnnnnnnnnnnnnnnnnnnnnnnnnnnnnnnnnnnnnnnnnnnnnnnnnnnnnnnnnnnnnnnnnnnnnnnnnnnnnnnnnnnnnnnnnnnnnnnnnnnnnnnnnnnnnnnnnnnnnnnnnnnnnnnnnnnnnnnnnnnnnnnnnnnnnnnnnnnnnnnnnnnnnnnnnnnnnnnnnnnnnnnnnnnnnnnnnnnnnnnnnnnnnnnnnnnnnnnnnnnnnnnnnnnnnnnnnnnnnnnnnnnnnnnnnnnnnnnnnnnnnnnnnnnnnnnnnnnnnnnnnnnnnnnnnnnnnnnnnnnnnnnnnnnnnnnnnnnnnnnnnnnnnnnnnnnnnnnnnnnnnnnnnnnnnnnnnnnnnnnnnnnnnnnnnnnnnnnnnnnnnnnnnnnnnnnnnnnnnnnnnnnnnnnnnnnnnnnnnnnnnnnnnnnnnnnnnnnnnnnnnnnnnnnnnnnnnnnnnnnnnnnnnnnnnnnnnnnnnnnnnnnnnnnnnnnnnnnnnnnnnnnnnnnnnnnnnnnnnnnnnnnnnnnnnnnnnnnnnnnnnnnnnnnnnnnnnnnnnnnnnnnnnnnnnnnnnnnnnnnnnnnnnnnnnnnnnnnnnnnnnnnnnnnnnnnnnnnnnnnnnnnnnnnnnnnnnnnnnnnnnnnnnnnnnnnnnnnnnnnnnnnnnnnnnnnnnnnnnnnnnnnnnnnnnnnnnnnnnnnnnnnnnnnnnnnnnnnnnnnnnnnnnnnnnnnnnnnnnnnnnnnnnnnnnnnnnnnnnnnnnnnnnnnnnnnnnnnnnnnnnnnnnnnnnnnnnnnnnnnnnnnnnnnnnnnnnnnnnnnnnnnnnnnnnnnnnnnnnnnnnnnnnnnnnnnnnnnnnnnnnnnnnnnnnnnnnnnnnnnnnnnnnnnnnnnnnnnnnnnnnnnnnnnnnnnnnnnnnnnnnnnnnnnnnnnnnnnnnnnnnnnnnnnnnnnnnnnnnnnnnnnnnnnnnnnnnnnnnnnnnnnnnnnnnnnnnnnnnnnnnnnnnnnnnnnnnnnnnnnnnnnnnnnnnnnnnnnnnnnnnnnnnnnnnnnnnnnnnnnnnnnnnnnnnnnnnnnnnnnnnnnnnnnnnnnnnnnnnnnnnnnnnnnnnnnnnnnnnnnnnnnnnnnnnnnnnnnnnnnnnnnnnnnnnnnnnnnnnnnnnnnnnnnnnnnnnnnnnnnnnnnnnnnnnnnnnnnnnnnnnnnnnnnnnnnnnnnnnnnnnnnnnnnnnnnnnnnnnnnnnnnnnnnnnnnnnnnnnnnnnnnnnnnnnnnnnnnnnnnnnnnnnnnnnnnnnnnnnnnnnnnnnnnnnnnnnnnnnnnnnnnnnnnnnnnnnnnnnnnnnnnnnnnnnnnnnnnnnnnnnnnnnnnnnnnnnnnnnnnnnnnnnnnnnnnnnnnnnnnnnnnnnnnnnnnnnnnnnnnnnnnnnnnnnnnnnnnnnnnnnnnnnnnnnnnnnnnnnnnnnnnnnnnnnnnnnnnnnnnnnnnnnnnnnnnnnnnnnnnnnnnnnnnnnnnnnnnnnnnnnnnnnnnnnnnnnnnnnnnnnnnnnnnnnnnnnnnnnnnnnnnnnnnnnnnnnnnnnnnnnnnnnnnnnnnnnnnnnnnnnnnnnnnnnnnnnnnnnnnnnnnnnnnnnnnnnnnnnnnnnnnnnnnnnnnnnnnnnnnnnnnnnnnnnnnnnnnnnnnnnnnnnnnnnnnnnnnnnnnnnnnnnnnnnnnnnnnnnnnnnnnnnnnnnnnnnnnnnnnnnnnnnnnnnnnnnnnnnnnnnnnnnnnnnnnnnnnnnnnnnnnnnnnnnnnnnnnnnnnnnnnnnnnnnnnnnnnnnnnnnnnnnnnnnnnnnnnnnnnnnnnnnnnnnnnnnnnnnnnnnnnnnnnnnnnnnnnnnnnnnnnnnnnnnnnnnnnnnnnnnnnnnnnnnnnnnnnnnnnnnnnnnnnnnnnnnnnnnnnnnnnnnnnnnnnnnnnnnnnnnnnnnnnnnnnnnnnnnnnnnnnnnnnnnnnnnnnnnnnnnnnnnnnnnnnnnnnnnnnnnnnnnnnnnnnnnnnnnnnnnnnnnnnnnnnnnnnnnnnnnnnnnnnnnnnnnnnnnnnnnnnnnnnnnnnnnnnnnnnnnnnnnnnnnnnnnnnnnnnnnnnnnnnnnnnnnnnnnnnnnnnnnnnnnnnnnnnnnnnnnnnnnnnnnnnnnnnnnnnnnnnnnnnnnnnnnnnnnnnnnnnnnnnnnnnnnnnnnnnnnnnnnnnnnnnnnnnnnnnnnnnnnnnnnnnnnnnnnnnnnnnnnnnnnnnnnnnnnnnnnnnnnnnnnnnnnnnnnnnnnnnnnnnnnnnnnnnnnnnnnnnnnnnnnnnnnnnnnnnnnnnnnnnnnnnnnnnnnnnnnnnnnnnnnnnnnnnnnnnnnnnnnnnnnnnnnnnnnnnnnnnnnnnnnnnnnnnnnnnnnnnnnnnnnnnnnnnnnnnnnnnnnnnnnnnnnnnnnnnnnnnnnnnnnnnnnnnnnnnnnnnnnnnnnnnnnnnnnnnnnnnnnnnnnnnnnnnnnnnnnnnnnnnnnnnnnnnnnnnnnnnnnnnnnnnnnnnnnnnnnnnnnnnnnnnnnnnnnnnnnnnnnnnnnnnnnnnnnnnnnnnnnnnnnnnnnnnnnnnnnnnnnnnnnnnnnnnnnnnnnnnnnnnnnnnnnnnnnnnnnnnnnnnnnnnnnnnnnnnnnnnnnnnnnnnnnnnnnnnnnnnnnnnnnnnnnnnnnnnnnnnnnnnnnnnnnnnnnnnnnnnnnnnnnnnnnnnnnnnnnnnnnnnnnnnnnnnnnnnnnnnnnnnnnnnnnnnnnnnnnnnnnnnnnnnnnnnnnnnnnnnnnnnnnnnnnnnnnnnnnnnnnnnnnnnnnnnnnnnnnnnnnnnnnnnnnnnnnnnnnnnnnnnnnnnnnnnnnnnnnnnnnnnnnnnnnnnnnnnnnnnnnnnnnnnnnnnnnnnnnnnnnnnnnnnnnnnnnnnnnnnnnnnnnnnnnnnnnnnnnnnnnnnnnnnnnnnnnnnnnnnnnnnnnnnnnnnnnnnnnnnnnnnnnnnnnnnnnnnnnnnnnnnnnnnnnnnnnnnnnnnnnnnnnnnnnnnnnnnnnnnnnnnnnnnnnnnnnnnnnnnnnnnnnnnnnnnnnnnnnnnnnnnnnnnnnnnnnnnnnnnnnnnnnnnnnnnnnnnnnnnnnnnnnnnnnnnnnnnnnnnnnnnnnnnnnnnnnnnnnnnnnnnnnnnnnnnnnnnnnnnnnnnnnnnnnnnnnnnnnnnnnnnnnnnnnnnnnnnnnnnnnnnnnnnnnnnnnnnnnnnnnnnnnnnnnnnnnnnnnnnnnnnnnnnnnnnnnnnnnnnnnnnnnnnnnnnnnnnnnnnnnnnnnnnnnnnnnnnnnnnnnnnnnnnnnnnnnnnnnnnnnnnnnnnnnnnnnnnnnnnnnnnnnnnnnnnnnnnnnnnnnnnnnnnnnnnnnnnnnnnnnnnnnnnnnnnnnnnnnnnnnnnnnnnnnnnnnnnnnnnnnnnnnnnnnnnnnnnnnnnnnnnnnnnnnnnnnnnnnnnnnnnnnnnnnnnnnnnnnnnnnnnnnnnnnnnnnnnnnnnnnnnnnnnnnnnnnnnnnnnnnnnnnnnnnnnnnnnnnnnnnnnnnnnnnnnnnnnnnnnnnnnnnnnnnnnnnnnnnnnnnnnnnnnnnnnnnnnnnnnnnnnnnnnnnnnnnnnnnnnnnnnnnnnnnnnnnnnnnnnnnnnnnnnnnnnnnnnnnnnnnnnnnnnnnnnnnnnnnnnnnnnnnnnnnnnnnnnnnnnnnnnnnnnnnnnnnnnnnnnnnnnnnnnnnnnnnnnnnnnnnnnnnnnnnnnnnnnnnnnnnnnnnnnnnnnnnnnnnnnnnnnnnnnnnnnnnnnnnnnnnnnnnnnnnnnnnnnnnnnnnnnnnnnnnnnnnnnnnnnnnnnnnnnnnnnnnnnnnnnnnnnnnnnnnnnnnnnnnnnnnnnnnnnnnnnnnnnnnnnnnnnnnnnnnnnnnnnnnnnnnnnnnnnnnnnnnnnnnnnnnnnnnnnnnnnnnnnnnnnnnnnnnnnnnnnnnnnnnnnnnnnnnnnnnnnnnnnnnnnnnnnnnnnnnnnnnnnnnnnnnnnnnnnnnnnnnnnnnnnnnnnnnnnnnnnnnnnnnnnnnnnnnnnnnnnnnnnnnnnnnnnnnnnnnnnnnnnnnnnnnnnnnnnnnnnnnnnnnnnnnnnnnnnnnnnnnnnnnnnnnnnnnnnnnnnnnnnnnnnnnnnnnnnnnnnnnnnnnnnnnnnnnnnnnnnnnnnnnnnnnnnnnnnnnnnnnnnnnnnnnnnnnnnnnnnnnnnnnnnnnnnnnnnnnnnnnnnnnnnnnnnnnnnnnnnnnnnnnnnnnnnnnnnnnnnnnnnnnnnnnnnnnnnnnnnnnnnnnnnnnnnnnnnnnnnnnnnnnnnnnnnnnnnnnnnnnnnnnnnnnnnnnnnnnnnnnnnnnnnnnnnnnnnnnnnnnnnnnnnnnnnnnnnnnnnnnnnnnnnnnnnnnnnnnnnnnnnnnnnnnnnnnnnnnnnnnnnnnnnnnnnnnnnnnnnnnnnnnnnnnnnnnnnnnnnnnnnnnnnnnnnnnnnnnnnnnnnnnnnnnnnnnnnnnnnnnnnnnnnnnnnnnnnnnnnnnnnnnnnnnnnnnnnnnnnnnnnnnnnnnnnnnnnnnnnnnnnnnnnnnnnnnnnnnnnnnnnnnnnnnnnnnnnnnnnnnnnnnnnnnnnnnnnnnnnnnnnnnnnnnnnnnnnnnnnnnnnnnnnnnnnnnnnnnnnnnnnnnnnnnnnnnnnnnnnnnnnnnnnnnnnnnnnnnnnnnnnnnnnnnnnnnnnnnnnnnnnnnnnnnnnnnnnnnnnnnnnnnnnnnnnnnnnnnnnnnnnnnnnnnnnnnnnnnnnnnnnnnnnnnnnnnnnnnnnnnnnnnnnnnnnnnnnnnnnnnnnnnnnnnnnnnnnnnnnnnnnnnnnnnnnnnnnnnnnnnnnnnnnnnnnnnnnnnnnnnnnnnnnnnnnnnnnnnnnnnnnnnnnnnnnnnnnnnnnnnnnnnnnnnnnnnnnnnnnnnnnnnnnnnnnnnnnnnnnnnnnnnnnnnnnnnnnnnnnnnnnnnnnnnnnnnnnnnnnnnnnnnnnnnnnnnnnnnnnnnnnnnnnnnnnnnnnnnnnnnnnnnnnnnnnnnnnnnnnnnnnnnnnnnnnnnnnnnnnnnnnnnnnnnnnnnnnnnnnnnnnnnnnnnnnnnnnnnnnnnnnnnnnnnnnnnnnnnnnnnnnnnnnnnnnnnnnnnnnnnnnnnnnnnnnnnnnnnnnnnnnnnnnnnnnnnnnnnnnnnnnnnnnnnnnnnnnnnnnnnnnnnnnnnnnnnnnnnnnnnnnnnnnnnnnnnnnnnnnnnnnnnnnnnnnnnnnnnnnnnnnnnnnnnnnnnnnnnnnnnnnnnnnnnnnnnnnnnnnnnnnnnnnnnnnnnnnnnnnnnnnnnnnnnnnnnnnnnnnnnnnnnnnnnnnnnnnnnnnnnnnnnnnnnnnnnnnnnnnnnnnnnnnnnnnnnnnnnnnnnnnnnnnnnnnnnnnnnnnnnnnnnnnnnnnnnnnnnnnnnnnnnnnnnnnnnnnnnnnnnnnnnnnnnnnnnnnnnnnnnnnnnnnnnnnnnnnnnnnnnnnnnnnnnnnnnnnnnnnnnnnnnnnnnnnnnnnnnnnnnnnnnnnnnnnnnnnnnnnnnnnnnnnnnnnnnnnnnnnnnnnnnnnnnnnnnnnnnnnnnnnnnnnnnnnnnnnnnnnnnnnnnnnnnnnnnnnnnnnnnnnnnnnnnnnnnnnnnnnnnnnnnnnnnnnnnnnnnnnnnnnnnnnnnnnnnnnnnnnnnnnnnnnnnnnnnnnnnnnnnnnnnnnnnnnnnnnnnnnnnnnnnnnnnnnnnnnnnnnnnnnnnnnnnnnnnnnnnnnnnnnnnnnnnnnnnnnnnnnnnnnnnnnnnnnnnnnnnnnnnnnnnnnnnnnnnnnnnnnnnnnnnnnnnnnnnnnnnnnnnnnnnnnnnnnnnnnnnnnnnnnnnnnnnnnnnnnnnnnnnnnnnnnnnnnnnnnnnnnnnnnnnnnnnnnnnnnnnnnnnnnnnnnnnnnnnnnnnnnnnnnnnnnnnnnnnnnnnnnnnnnnnnnnnnnnnnnnnnnnnnnnnnnnnnnnnnnnnnnnnnnnnnnnnnnnnnnnnnnnnnnnnnnnnnnnnnnnnnnnnnnnnnnnnnnnnnnnnnnnnnnnnnnnnnnnnnnnnnnnnnnnnnnnnnnnnnnnnnnnnnnnnnnnnnnnnnnnnnnnnnnnnnnnnnnnnnnnnnnnnnnnnnnnnnnnnnnnnnnnnnnnnnnnnnnnnnnnnnnnnnnnnnnnnnnnnnnnnnnnnnnnnnnnnnnnnnnnnnnnnnnnnnnnnnnnnnnnnnnnnnnnnnnnnnnnnnnnnnnnnnnnnnnnnnnnnnnnnnnnnnnnnnnnnnnnnnnnnnnnnnnnnnnnnnnnnnnnnnnnnnnnnnnnnnnnnnnnnnnnnnnnnnnnnnnnnnnnnnnnnnnnnnnnnnnnnnnnnnnnnnnnnnnnnnnnnnnnnnnnnnnnnnnnnnnnnnnnnnnnnnnnnnnnnnnnnnnnnnnnnnnnnnnnnnnnnnnnnnnnnnnnnnnnnnnnnnnnnnnnnnnnnnnnnnnnnnnnnnnnnnnnnnnnnnnnnnnnnnnnnnnnnnnnnnnnnnnnnnnnnnnnnnnnnnnnnnnnnnnnnnnnnnnnnnnnnnnnnnnnnnnnnnnnnnnnnnnnnnnnnnnnnnnnnnnnnnnnnnnnnnnnnnnnnnnnnnnnnnnnnnnnnnnnnnnnnnnnnnnnnnnnnnnnnnnnnnnnnnnnnnnnnnnnnnnnnnnnnnnnnnnnnnnnnnnnnnnnnnnnnnnnnnnnnnnnnnnnnnnnnnnnnnnnnnnnnnnnnnnnnnnnnnnnnnnnnnnnnnnnnnnnnnnnnnnnnnnnnnnnnnnnnnnnnnnnnnnnnnnnnnnnnnnnnnnnnnnnnnnnnnnnnnnnnnnnnnnnnnnnnnnnnnnnnnnnnnnnnnnnnnnnnnnnnnnnnnnnnnnnnnnnnnnnnnnnnnnnnnnnnnnnnnnnnnnnnnnnnnnnnnnnnnnnnnnnnnnnnnnnnnnnnnnnnnnnnnnnnnnnnnnnnnnnnnnnnnnnnnnnnnnnnnnnnnnnnnnnnnnnnnnnnnnnnnnnnnnnnnnnnnnnnnnnnnnnnnnnnnnnnnnnnnnnnnnnnnnnnnnnnnnnnnnnnnnnnnnnnnnnnnnnnnnnnnnnnnnnnnnnnnnnnnnnnnnnnnnnnnnnnnnnnnnnnnnnnnnnnnnnnnnnnnnnnnnnnnnnnnnnnnnnnnnnnnnnnnnnnnnnnnnnnnnnnnnnnnnnnnnnnnnnnnnnnnnnnnnnnnnnnnnnnnnnnnnnnnnnnnnnnnnnnnnnnnnnnnnnnnnnnnnnnnnnnnnnnnnnnnnnnnnnnnnnnnnnnnnnnnnnnnnnnnnnnnnnnnnnnnnnnnnnnnnnnnnnnnnnnnnnnnnnnnnnnnnnnnnnnnnnnnnnnnnnnnnnnnnnnnnnnnnnnnnnnnnnnnnnnnnnnnnnnnnnnnnnnnnnnnnnnnnnnnnnnnnnnnnnnnnnnnnnnnnnnnnnnnnnnnnnnnnnnnnnnnnnnnnnnnnnnnnnnnnnnnnnnnnnnnnnnnnnnnnnnnnnnnnnnnnnnnnnnnnnnnnnnnnnnnnnnnnnnnnnnnnnnnnnnnnnnnnnnnnnnnnnnnnnnnnnnnnnnnnnnnnnnnnnnnnnnnnnnnnnnnnnnnnnnnnnnnnnnnnnnnnnnnnnnnnnnnnnnnnnnnnnnnnnnnnnnnnnnnnnnnnnnnnnnnnnnnnnnnnnnnnnnnnnnnnnnnnnnnnnnnnnnnnnnnnnnnnnnnnnnnnnnnnnnnnnnnnnnnnnnnnnnnnnnnnnnnnnnnnnnnnnnnnnnnnnnnnnnnnnnnnnnnnnnnnnnnnnnnnnnnnnnnnnnnnnnnnnnnnnnnnnnnnnnnnnnnnnnnnnnnnnnnnnnnnnnnnnnnnnnnnnnnnnnnnnnnnnnnnnnnnnnnnnnnnnnnnnnnnnnnnnnnnnnnnnnnnnnnnnnnnnnnnnnnnnnnnnnnnnnnnnnnnnnnnnnnnnnnnnnnnnnnnnnnnnnnnnnnnnnnnnnnnnnnnnnnnnnnnnnnnnnnnnnnnnnnnnnnnnnnnnnnnnnnnnnnnnnnnnnnnnnnnnnnnnnnnnnnnnnnnnnnnnnnnnnnnnnnnnnnnnnnnnnnnnnnnnnnnnnnnnnnnnnnnnnnnnnnnnnnnnnnnnnnnnnnnnnnnnnnnnnnnnnnnnnnnnnnnnnnnnnnnnnnnnnnnnnnnnnnnnnnnnnnnnnnnnnnnnnnnnnnnnnnnnnnnnnnnnnnnnnnnnnnnnnnnnnnnnnnnnnnnnnnnnnnnnnnnnnnnnnnnnnnnnnnnnnnnnnnnnnnnnnnnnnnnnnnnnnnnnnnnnnnnnnnnnnnnnnnnnnnnnnnnnnnnnnnnnnnnnnnnnnnnnnnnnnnnnnnnnnnnnnnnnnnnnnnnnnnnnnnnnnnnnnnnnnnnnnnnnnnnnnnnnnnnnnnnnnnnnnnnnnnnnnnnnnnnnnnnnnnnnnnnnnnnnnnnnnnnnnnnnnnnnnnnnnnnnnnnnnnnnnnnnnnnnnnnnnnnnnnnnnnnnnnnnnnnnnnnnnnnnnnnnnnnnnnnnnnnnnnnnnnnnnnnnnnnnnnnnnnnnnnnnnnnnnnnnnnnnnnnnnnnnnnnnnnnnnnnnnnnnnnnnnnnnnnnnnnnnnnnnnnnnnnnnnnnnnnnnnnnnnnnnnnnnnnnnnnnnnnnnnnnnnnnnnnnnnnnnnnnnnnnnnnnnnnnnnnnnnnnnnnnnnnnnnnnnnnnnnnnnnnnnnnnnnnnnnnnnnnnnnnnnnnnnnnnnnnnnnnnnnnnnnnnnnnnnnnnnnnnnnnnnnnnnnnnnnnnnnnnnnnnnnnnnnnnnnnnnnnnnnnnnnnnnnnnnnnnnnnnnnnnnnnnnnnnnnnnnnnnnnnnnnnnnnnnnnnnnnnnnnnnnnnnnnnnnnnnnnnnnnnnnnnnnnnnnnnnnnnnnnnnnnnnnnnnnnnnnnnnnnnnnnnnnnnnnnnnnnnnnnnnnnnnnnnnnnnnnnnnnnnnnnnnnnnnnnnnnnnnnnnnnnnnnnnnnnnnnnnnnnnnnnnnnnnnnnnnnnnnnnnnnnnnnnnnnnnnnnnnnnnnnnnnnnnnnnnnnnnnnnnnnnnnnnnnnnnnnnnnnnnnnnnnnnnnnnnnnnnnnnnnnnnnnnnnnnnnnnnnnnnnnnnnnnnnnnnnnnnnnnnnnnnnnnnnnnnnnnnnnnnnnnnnnnnnnnnnnnnnnnnnnnnnnnnnnnnnnnnnnnnnnnnnnnnnnnnnnnnnnnnnnnnnnnnnnnnnnnnnnnnnnnnnnnnnnnnnnnnnnnnnnnnnnnnnnnnnnnnnnnnnnnnnnnnnnnnnnnnnnnnnnnnnnnnnnnnnnnnnnnnnnnnnnnnnnnnnnnnnnnnnnnnnnnnnnnnnnnnnnnnnnnnnnnnnnnnnnnnnnnnnnnnnnnnnnnnnnnnnnnnnnnnnnnnnnnnnnnnnnnnnnnnnnnnnnnnnnnnnnnnnnnnnnnnnnnnnnnnnnnnnnnnnnnnnnnnnnnnnnnnnnnnnnnnnnnnnnnnnnnnnnnnnnnnnnnnnnnnnnnnnnnnnnnnnnnnnnnnnnnnnnnnnnnnnnnnnnnnnnnnnnnnnnnnnnnnnnnnnnnnnnnnnnnnnnnnnnnnnnnnnnnnnnnnnnnnnnnnnnnnnnnnnnnnnnnnnnnnnnnnnnnnnnnnnnnnnnnnnnnnnnnnnnnnnnnnnnnnnnnnnnnnnnnnnnnnnnnnnnnnnnnnnnnnnnnnnnnnnnnnnnnnnnnnnnnnnnnnnnnnnnnnnnnnnnnnnnnnnnnnnnnnnnnnnnnnnnnnnnnnnnnnnnnnnnnnnnnnnnnnnnnnnnnnnnnnnnnnnnnnnnnnnnnnnnnnnnnnnnnnnnnnnnnnnnnnnnnnnnnnnnnnnnnnnnnnnnnnnnnnnnnnnnnnnnnnnnnnnnnnnnnnnnnnnnnnnnnnnnnnnnnnnnnnnnnnnnnnnnnnnnnnnnnnnnnnnnnnnnnnnnnnnnnnnnnnnnnnnnnnnnnnnnnnnnnnnnnnnnnnnnnnnnnnnnnnnnnnnnnnnnnnnnnnnnnnnnnnnnnnnnnnnnnnnnnnnnnnnnnnnnnnnnnnnnnnnnnnnnnnnnnnnnnnnnnnnnnnnnnnnnnnnnnnnnnnnnnnnnnnnnnnnnnnnnnnnnnnnnnnnnnnnnnnnnnnnnnnnnnnnnnnnnnnnnnnnnnnnnnnnnnnnnnnnnnnnnnnnnnnnnnnnnnnnnnnnnnnnnnnnnnnnnnnnnnnnnnnnnnnnnnnnnnnnnnnnnnnnnnnnnnnnnnnnnnnnnnnnnnnnnnnnnnnnnnnnnnnnnnnnnnnnnnnnnnnnnnnnnnnnnnnnnnnnnnnnnnnnnnnnnnnnnnnnnnnnnnnnnnnnnnnnnnnnnnnnnnnnnnnnnnnnnnnnnnnnnnnnnnnnnnnnnnnnnnnnnnnnnnnnnnnnnnnnnnnnnnnnnnnnnnnnnnnnnnnnnnnnnnnnnnnnnnnnnnnnnnnnnnnnnnnnnnnnnnnnnnnnnnnnnnnnnnnnnnnnnnnnnnnnnnnnnnnnnnnnnnnnnnnnnnnnnnnnnnnnnnnnnnnnnnnnnnnnnnnnnnnnnnnnnnnnnnnnnnnnnnnnnnnnnnnnnnnnnnnnnnnnnnnnnnnnnnnnnnnnnnnnnnnnnnnnnnnnnnnnnnnnnnnnnnnnnnnnnnnnnnnnnnnnnnnnnnnnnnnnnnnnnnnnnnnnnnnnnnnnnnnnnnnnnnnnnnnnnnnnnnnnnnnnnnnnnnnnnnnnnnnnnnnnnnnnnnnnnnnnnnnnnnnnnnnnnnnnnnnnnnnnnnnnnnnnnnnnnnnnnnnnnnnnnnnnnnnnnnnnnnnnnnnnnnnnnnnnnnnnnnnnnnnnnnnnnnnnnnnnnnnnnnnnnnnnnnnnnnnnnnnnnnnnnnnnnnnnnnnnnnnnnnnnnnnnnnnnnnnnnnnnnnnnnnnnnnnnnnnnnnnnnnnnnnnnnnnnnnnnnnnnnnnnnnnnnnnnnnnnnnnnnnnnnnnnnnnnnnnnnnnnnnnnnnnnnnnnnnnnnnnnnnnnnnnnnnnnnnnnnnnnnnnnnnnnnnnnnnnnnnnnnnnnnnnnnnnnnnnnnnnnnnnnnnnnnnnnnnnnnnnnnnnnnnnnnnnnnnnnnnnnnnnnnnnnnnnnnnnnnnnnnnnnnnnnnnnnnnnnnnnnnnnnnnnnnnnnnnnnnnnnnnnnnnnnnnnnnnnnnnnnnnnnnnnnnnnnnnnnnnnnnnnnnnnnnnnnnnnnnnnnnnnnnnnnnnnnnnnnnnnnnnnnnnnnnnnnnnnnnnnnnnnnnnnnnnnnnnnnnnnnnnnnnnnnnnnnnnnnnnnnnnnnnnnnnnnnnnnnnnnnnnnnnnnnnnnnnnnnnnnnnnnnnnnnnnnnnnnnnnnnnnnnnnnnnnnnnnnnnnnnnnnnnnnnnnnnnnnnnnnnnnnnnnnnnnnnnnnnnnnnnnnnnnnnnnnnnnnnnnnnnnnnnnnnnnnnnnnnnnnnnnnnnnnnnnnnnnnnnnnnnnnnnnnnnnnnnnnnnnnnnnnnnnnnnnnnnnnnnnnnnnnnnnnnnnnnnnnnnnnnnnnnnnnnnnnnnnnnnnnnnnnnnnnnnnnnnnnnnnnnnnnnnnnnnnnnnnnnnnnnnnnnnnnnnnnnnnnnnnnnnnnnnnnnnnnnnnnnnnnnnnnnnnnnnnnnnnnnnnnnnnnnnnnnnnnnnnnnnnnnnnnnnnnnnnnnnnnnnnnnnnnnnnnnnnnnnnnnnnnnnnnnnnnnnnnnnnnnnnnnnnnnnnnnnnnnnnnnnnnnnnnnnnnnnnnnnnnnnnnnnnnnnnnnnnnnnnnnnnnnnnnnnnnnnnnnnnnnnnnnnnnnnnnnnnnnnnnnnnnnnnnnnnnnnnnnnnnnnnnnnnnnnnnnnnnnnnnnnnnnnnnnnnnnnnnnnnnnnnnnnnnnnnnnnnnnnnnnnnnnnnnnnnnnnnnnnnnnnnnnnnnnnnnnnnnnnnnnnnnnnnnnnnnnnnnnnnnnnnnnnnnnnnnnnnnnnnnnnnnnnnnnnnnnnnnnnnnnnnnnnnnnnnnnnnnnnnnnnnnnnnnnnnnnnnnnnnnnnnnnnnnnnnnnnnnnnnnnnnnnnnnnnnnnnnnnnnnnnnnnnnnnnnnnnnnnnnnnnnnnnnnnnnnnnnnnnnnnnnnnnnnnnnnnnnnnnnnnnnnnnnnnnnnnnnnnnnnnnnnnnnnnnnnnnnnnnnnnnnnnnnnnnnnnnnnnnnnnnnnnnnnnnnnnnnnnnnnnnnnnnnnnnnnnnnnnnnnnnnnnnnnnnnnnnnnnnnnnnnnnnnnnnnnnnnnnnnnnnnnnnnnnnnnnnnnnnnnnnnnnnnnnnnnnnnnnnnnnnnnnnnnnnnnnnnnnnnnnnnnnnnnnnnnnnnnnnnnnnnnnnnnnnnnnnnnnnnnnnnnnnnnnnnnnnnnnnnnnnnnnnnnnnnnnnnnnnnnnnnnnnnnnnnnnnnnnnnnnnnnnnnnnnnnnnnnnnnnnnnnnnnnnnnnnnnnnnnnnnnnnnnnnnnnnnnnnnnnnnnnnnnnnnnnnnnnnnnnnnnnnnnnnnnnnnnnnnnnnnnnnnnnnnnnnnnnnnnnnnnnnnnnnnnnnnnnnnnnnnnnnnnnnnnnnnnnnnnnnnnnnnnnnnnnnnnnnnnnnnnnnnnnnnnnnnnnnnnnnnnnnnnnnnnnnnnnnnnnnnnnnnnnnnnnnnnnnnnnnnnnnnnnnnnnnnnnnnnnnnnnnnnnnnnnnnnnnnnnnnnnnnnnnnnnnnnnnnnnnnnnnnnnnnnnnnnnnnnnnnnnnnnnnnnnnnnnnnnnnnnnnnnnnnnnnnnnnnnnnnnnnnnnnnnnnnnnnnnnnnnnnnnnnnnnnnnnnnnnnnnnnnnnnnnnnnnnnnnnnnnnnnnnnnnnnnnnnnnnnnnnnnnnnnnnnnnnnnnnnnnnnnnnnnnnnnnnnnnnnnnnnnnnnnnnnnnnnnnnnnnnnnnnnnnnnnnnnnnnnnnnnnnnnnnnnnnnnnnnnnnnnnnnnnnnnnnnnnnnnnnnnnnnnnnnnnnnnnnnnnnnnnnnnnnnnnnnnnnnnnnnnnnnnnnnnnnnnnnnnnnnnnnnnnnnnnnnnnnnnnnnnnnnnnnnnnnnnnnnnnnnnnnnnnnnnnnnnnnnnnnnnnnnnnnnnnnnnnnnnnnnnnnnnnnnnnnnnnnnnnnnnnnnnnnnnnnnnnnnnnnnnnnnnnnnnnnnnnnnnnnnnnnnnnnnnnnnnnnnnnnnnnnnnnnnnnnnnnnnnnnnnnnnnnnnnnnnnnnnnnnnnnnnnnnnnnnnnnnnnnnnnnnnnnnnnnnnnnnnnnnnnnnnnnnnnnnnnnnnnnnnnnnnnnnnnnnnnnnnnnnnnnnnnnnnnnnnnnnnnnnnnnnnnnnnnnnnnnnnnnnnnnnnnnnnnnnnnnnnnnnnnnnnnnnnnnnnnnnnnnnnnnnnnnnnnnnnnnnnnnnnnnnnnnnnnnnnnnnnnnnnnnnnnnnnnnnnnnnnnnnnnnnnnnnnnnnnnnnnnnnnnnnnnnnnnnnnnnnnnnnnnnnnnnnnnnnnnnnnnnnnnnnnnnnnnnnnnnnnnnnnnnnnnnnnnnnnnnnnnnnnnnnnnnnnnnnnnnnnnnnnnnnnnnnnnnnnnnnnnnnnnnnnnnnnnnnnnnnnnnnnnnnnnnnnnnnnnnnnnnnnnnnnnnnnnnnnnnnnnnnnnnnnnnnnnnnnnnnnnnnnnnnnnnnnnnnnnnnnnnnnnnnnnnnnnnnnnnnnnnnnnnnnnnnnnnnnnnnnnnnnnnnnnnnnnnnnnnnnnnnnnnnnnnnnnnnnnnnnnnnnnnnnnnnnnnnnnnnnnnnnnnnnnnnnnnnnnnnnnnnnnnnnnnnnnnnnnnnnnnnnnnnnnnnnnnnnnnnnnnnnnnnnnnnnnnnnnnnnnnnnnnnnnnnnnnnnnnnnnnnnnnnnnnnnnnnnnnnnnnnnnnnnnnnnnnnnnnnnnnnnnnnnnnnnnnnnnnnnnnnnnnnnnnnnnnnnnnnnnnnnnnnnnnnnnnnnnnnnnnnnnnnnnnnnnnnnnnnnnnnnnnnnnnnnnnnnnnnnnnnnnnnnnnnnnnnnnnnnnnnnnnnnnnnnnnnnnnnnnnnnnnnnnnnnnnnnnnnnnnnnnnnnnnnnnnnnnnnnnnnnnnnnnnnnnnnnnnnnnnnnnnnnnnnnnnnnnnnnnnnnnnnnnnnnnnnnnnnnnnnnnnnnnnnnnnnnnnnnnnnnnnnnnnnnnnnnnnnnnnnnnnnnnnnnnnnnnnnnnnnnnnnnnnnnnnnnnnnnnnnnnnnnnnnnnnnnnnnnnnnnnnnnnnnnnnnnnnnnnnnnnnnnnnnnnnnnnnnnnnnnnnnnnnnnnnnnnnnnnnnnnnnnnnnnnnnnnnnnnnnnnnnnnnnnnnnnnnnnnnnnnnnnnnnnnnnnnnnnnnnnnnnnnnnnnnnnnnnnnnnnnnnnnnnnnnnnnnnnnnnnnnnnnnnnnnnnnnnnnnnnnnnnnnnnnnnnnnnnnnnnnnnnnnnnnnnnnnnnnnnnnnnnnnnnnnnnnnnnnnnnnnnnnnnnnnnnnnnnnnnnnnnnnnnnnnnnnnnnnnnnnnnnnnnnnnnnnnnnnnnnnnnnnnnnnnnnnnnnnnnnnnnnnnnnnnnnnnnnnnnnnnnnnnnnnnnnnnnnnnnnnnnnnnnnnnnnnnnnnnnnnnnnnnnnnnnnnnnnnnnnnnnnnnnnnnnnnnnnnnnnnnnnnnnnnnnnnnnnnnnnnnnnnnnnnnnnnnnnnnnnnnnnnnnnnnnnnnnnnnnnnnnnnnnnnnnnnnnnnnnnnnnnnnnnnnnnnnnnnnnnnnnnnnnnnnnnnnnnnnnnnnnnnnnnnnnnnnnnnnnnnnnnnnnnnnnnnnnnnnnnnnnnnnnnnnnnnnnnnnnnnnnnnnnnnnnnnnnnnnnnnnnnnnnnnnnnnnnnnnnnnnnnnnnnnnnnnnnnnnnnnnnnnnnnnnnnnnnnnnnnnnnnnnnnnnnnnnnnnnnnnnnnnnnnnnnnnnnnnnnnnnnnnnnnnnnnnnnnnnnnnnnnnnnnnnnnnnnnnnnnnnnnnnnnnnnnnnnnnnnnnnnnnnnnnnnnnnnnnnnnnnnnnnnnnnnnnnnnnnnnnnnnnnnnnnnnnnnnnnnnnnnnnnnnnnnnnnnnnnnnnnnnnnnnnnnnnnnnnnnnnnnnnnnnnnnnnnnnnnnnnnnnnnnnnnnnnnnnnnnnnnnnnnnnnnnnnnnnnnnnnnnnnnnnnnnnnnnnnnnnnnnnnnnnnnnnnnnnnnnnnnnnnnnnnnnnnnnnnnnnnnnnnnnnnnnnnnnnnnnnnnnnnnnnnnnnnnnnnnnnnnnnnnnnnnnnnnnnnnnnnnnnnnnnnnnnnnnnnnnnnnnnnnnnnnnnnnnnnnnnnnnnnnnnnnnnnnnnnnnnnnnnnnnnnnnnnnnnnnnnnnnnnnnnnnnnnnnnnnnnnnnnnnnnnnnnnnnnnnnnnnnnnnnnnnnnnnnnnnnnnnnnnnnnnnnnnnnnnnnnnnnnnnnnnnnnnnnnnnnnnnnnnnnnnnnnnnnnnnnnnnnnnnnnnnnnnnnnnnnnnnnnnnnnnnnnnnnnnnnnnnnnnnnnnnnnnnnnnnnnnnnnnnnnnnnnnnnnnnnnnnnnnnnnnnnnnnnnnnnnnnnnnnnnnnnnnnnnnnnnnnnnnnnnnnnnnnnnnnnnnnnnnnnnnnnnnnnnnnnnnnnnnnnnnnnnnnnnnnnnnnnnnnnnnnnnnnnnnnnnnnnnnnnnnnnnnnnnnnnnnnnnnnnnnnnnnnnnnnnnnnnnnnnnnnnnnnnnnnnnnnnnnnnnnnnnnnnnnnnnnnnnnnnnnnnnnnnnnnnnnnnnnnnnnnnnnnnnnnnnnnnnnnnnnnnnnnnnnnnnnnnnnnnnnnnnnnnnnnnnnnnnnnnnnnnnnnnnnnnnnnnnnnnnnnnnnnnnnnnnnnnnnnnnnnnnnnnnnnnnnnnnnnnnnnnnnnnnnnnnnnnnnnnnnnnnnnnnnnnnnnnnnnnnnnnnnnnnnnnnnnnnnnnnnnnnnnnnnnnnnnnnnnnnnnnnnnnnnnnnnnnnnnnnnnnnnnnnnnnnnnnnnnnnnnnnnnnnnnnnnnnnnnnnnnnnnnnnnnnnnnnnnnnnnnnnnnnnnnnnnnnnnnnnnnnnnnnnnnnnnnnnnnnnnnnnnnnnnnnnnnnnnnnnnnnnnnnnnnnnnnnnnnnnnnnnnnnnnnnnnnnnnnnnnnnnnnnnnnnnnnnnnnnnnnnnnnnnnnnnnnnnnnnnnnnnnnnnnnnnnnnnnnnnnnnnnnnnnnnnnnnnnnnnnnnnnnnnnnnnnnnnnnnnnnnnnnnnnnnnnnnnnnnnnnnnnnnnnnnnnnnnnnnnnnnnnnnnnnnnnnnnnnnnnnnnnnnnnnnnnnnnnnnnnnnnnnnnnnnnnnnnnnnnnnnnnnnnnnnnnnnnnnnnnnnnnnnnnnnnnnnnnnnnnnnnnnnnnnnnnnnnnnnnnnnnnnnnnnnnnnnnnnnnnnnnnnnnnnnnnnnnnnnnnnnnnnnnnnnnnnnnnnnnnnnnnnnnnnnnnnnnnnnnnnnnnnnnnnnnnnnnnnnnnnnnnnnnnnnnnnnnnnnnnnnnnnnnnnnnnnnnnnnnnnnnnnnnnnnnnnnnnnnnnnnnnnnnnnnnnnnnnnnnnnnnnnnnnnnnnnnnnnnnnnnnnnnnnnnnnnnnnnnnnnnnnnnnnnnnnnnnnnnnnnnnnnnnnnnnnnnnnnnnnnnnnnnnnnnnnnnnnnnnnnnnnnnnnnnnnnnnnnnnnnnnnnnnnnnnnnnnnnnnnnnnnnnnnnnnnnnnnnnnnnnnnnnnnnnnnnnnnnnnnnnnnnnnnnnnnnnnnnnnnnnnnnnnnnnnnnnnnnnnnnnnnnnnnnnnnnnnnnnnnnnnnnnnnnnnnnnnnnnnnnnnnnnnnnnnnnnnnnnnnnnnnnnnnnnnnnnnnnnnnnnnnnnnnnnnnnnnnnnnnnnnnnnnnnnnnnnnnnnnnnnnnnnnnnnnnnnnnnnnnnnnnnnnnnnnnnnnnnnnnnnnnnnnnnnnnnnnnnnnnnnnnnnnnnnnnnnnnnnnnnnnnnnnnnnnnnnnnnnnnnnnnnnnnnnnnnnnnnnnnnnnnnnnnnnnnnnnnnnnnnnnnnnnnnnnnnnnnnnnnnnnnnnnnnnnnnnnnnnnnnnnnnnnnnnnnnnnnnnnnnnnnnnnnnnnnnnnnnnnnnnnnnnnnnnnnnnnnnnnnnnnnnnnnnnnnnnnnnnnnnnnnnnnnnnnnnnnnnnnnnnnnnnnnnnnnnnnnnnnnnnnnnnnnnnnnnnnnnnnnnnnnnnnnnnnnnnnnnnnnnnnnnnnnnnnnnnnnnnnnnnnnnnnnnnnnnnnnnnnnnnnnnnnnnnnnnnnnnnnnnnnnnnnnnnnnnnnnnnnnnnnnnnnnnnnnnnnnnnnnnnnnnnnnnnnnnnnnnnnnnnnnnnnnnnnnnnnnnnnnnnnnnnnnnnnnnnnnnnnnnnnnnnnnnnnnnnnnnnnnnnnnnnnnnnnnnnnnnnnnnnnnnnnnnnnnnnnnnnnnnnnnnnnnnnnnnnnnnnnnnnnnnnnnnnnnnnnnnnnnnnnnnnnnnnnnnnnnnnnnnnnnnnnnnnnnnnnnnnnnnnnnnnnnnnnnnnnnnnnnnnnnnnnnnnnnnnnnnnnnnnnnnnnnnnnnnnnnnnnnnnnnnnnnnnnnnnnnnnnnnnnnnnnnnnnnnnnnnnnnnnnnnnnnnnnnnnnnnnnnnnnnnnnnnnnnnnnnnnnnnnnnnnnnnnnnnnnnnnnnnnnnnnnnnnnnnnnnnnnnnnnnnnnnnnnnnnnnnnnnnnnnnnnnnnnnnnnnnnnnnnnnnnnnnnnnnnnnnnnnnnnnnnnnnnnnnnnnnnnnnnnnnnnnnnnnnnnnnnnnnnnnnnnnnnnnnnnnnnnnnnnnnnnnnnnnnnnnnnnnnnnnnnnnnnnnnnnnnnnnnnnnnnnnnnnnnnnnnnnnnnnnnnnnnnnnnnnnnnnnnnnnnnnnnnnnnnnnnnnnnnnnnnnnnnnnnnnnnnnnnnnnnnnnnnnnnnnnnnnnnnnnnnnnnnnnnnnnnnnnnnnnnnnnnnnnnnnnnnnnnnnnnnnnnnnnnnnnnnnnnnnnnnnnnnnnnnnnnnnnnnnnnnnnnnnnnnnnnnnnnnnnnnnnnnnnnnnnnnnnnnnnnnnnnnnnnnnnnnnnnnnnnnnnnnnnnnnnnnnnnnnnnnnnnnnnnnnnnnnnnnnnnnnnnnnnnnnnnnnnnnnnnnnnnnnnnnnnnnnnnnnnnnnnnnnnnnnnnnnnnnnnnnnnnnnnnnnnnnnnnnnnnnnnnnnnnnnnnnnnnnnnnnnnnnnnnnnnnnnnnnnnnnnnnnnnnnnnnnnnnnnnnnnnnnnnnnnnnnnnnnnnnnnnnnnnnnnnnnnnnnnnnnnnnnnnnnnnnnnnnnnnnnnnnnnnnnnnnnnnnnnnnnnnnnnnnnnnnnnnnnnnnnnnnnnnnnnnnnnnnnnnnnnnnnnnnnnnnnnnnnnnnnnnnnnnnnnnnnnnnnnnnnnnnnnnnnnnnnnnnnnnnnnnnnnnnnnnnnnnnnnnnnnnnnnnnnnnnnnnnnnnnnnnnnnnnnnnnnnnnnnnnnnnnnnnnnnnnnnnnnnnnnnnnnnnnnnnnnnnnnnnnnnnnnnnnnnnnnnnnnnnnnnnnnnnnnnnnnnnnnnnnnnnnnnnnnnnnnnnnnnnnnnnnnnnnnnnnnnnnnnnnnnnnnnnnnnnnnnnnnnnnnnnnnnnnnnnnnnnnnnnnnnnnnnnnnnnnnnnnnnnnnnnnnnnnnnnnnnnnnnnnnnnnnnnnnnnnnnnnnnnnnnnnnnnnnnnnnnnnnnnnnnnnnnnnnnnnnnnnnnnnnnnnnnnnnnnnnnnnnnnnnnnnnnnnnnnnnnnnnnnnnnnnnnnnnnnnnnnnnnnnnnnnnnnnnnnnnnnnnnnnnnnnnnnnnnnnnnnnnnnnnnnnnnnnnnnnnnnnnnnnnnnnnnnnnnnnnnnnnnnnnnnnnnnnnnnnnnnnnnnnnnnnnnnnnnnnnnnnnnnnnnnnnnnnnnnnnnnnnnnnnnnnnnnnnnnnnnnnnnnnnnnnnnnnnnnnnnnnnnnnnnnnnnnnnnnnnnnnnnnnnnnnnnnnnnnnnnnnnnnnnnnnnnnnnnnnnnnnnnnnnnnnnnnnnnnnnnnnnnnnnnnnnnnnnnnnnnnnnnnnnnnnnnnnnnnnnnnnnnnnnnnnnnnnnnnnnnnnnnnnnnnnnnnnnnnnnnnnnnnnnnnnnnnnnnnnnnnnnnnnnnnnnnnnnnnnnnnnnnnnnnnnnnnnnnnnnnnnnnnnnnnnnnnnnnnnnnnnnnnnnnnnnnnnnnnnnnnnnnnnnnnnnnnnnnnnnnnnnnnnnnnnnnnnnnnnnnnnnnnnnnnnnnnnnnnnnnnnnnnnnnnnnnnnnnnnnnnnnnnnnnnnnnnnnnnnnnnnnnnnnnnnnnnnnnnnnnnnnnnnnnnnnnnnnnnnnnnnnnnnnnnnnnnnnnnnnnnnnnnnnnnnnnnnnnnnnnnnnnnnnnnnnnnnnnnnnnnnnnnnnnnnnnnnnnnnnnnnnnnnnnnnnnnnnnnnnnnnnnnnnnnnnnnnnnnnnnnnnnnnnnnnnnnnnnnnnnnnnnnnnnnnnnnnnnnnnnnnnnnnnnnnnnnnnnnnnnnnnnnnnnnnnnnnnnnnnnnnnnnnnnnnnnnnnnnnnnnnnnnnnnnnnnnnnnnnnnnnnnnnnnnnnnnnnnnnnnnnnnnnnnnnnnnnnnnnnnnnnnnnnnnnnnnnnnnnnnnnnnnnnnnnnnnnnnnnnnnnnnnnnnnnnnnnnnnnnnnnnnnnnnnnnnnnnnnnnnnnnnnnnnnnnnnnnnnnnnnnnnnnnnnnnnnnnnnnnnnnnnnnnnnnnnnnnnnnnnnnnnnnnnnnnnnnnnnnnnnnnnnnnnnnnnnnnnnnnnnnnnnnnnnnnnnnnnnnnnnnnnnnnnnnnnnnnnnnnnnnnnnnnnnnnnnnnnnnnnnnnnnnnnnnnnnnnnnnnnnnnnnnnnnnnnnnnnnnnnnnnnnnnnnnnnnnnnnnnnnnnnnnnnnnnnnnnnnnnnnnnnnnnnnnnnnnnnnnnnnnnnnnnnnnnnnnnnnnnnnnnnnnnnnnnnnnnnnnnnnnnnnnnnnnnnnnnnnnnnnnnnnnnnnnnnnnnnnnnnnnnnnnnnnnnnnnnnnnnnnnnnnnnnnnnnnnnnnnnnnnnnnnnnnnnnnnnnnnnnnnnnnnnnnnnnnnnnnnnnnnnnnnnnnnnnnnnnnnnnnnnnnnnnnnnnnnnnnnnnnnnnnnnnnnnnnnnnnnnnnnnnnnnnnnnnnnnnnnnnnnnnnnnnnnnnnnnnnnnnnnnnnnnnnnnnnnnnnnnnnnnnnnnnnnnnnnnnnnnnnnnnnnnnnnnnnnnnnnnnnnnnnnnnnnnnnnnnnnnnnnnnnnnnnnnnnnnnnnnnnnnnnnnnnnnnnnnnnnnnnnnnnnnnnnnnnnnnnnnnnnnnnnnnnnnnnnnnnnnnnnnnnnnnnnnnnnnnnnnnnnnnnnnnnnnnnnnnnnnnnnnnnnnnnnnnnnnnnnnnnnnnnnnnnnnnnnnnnnnnnnnnnnnnnnnnnnnnnnnnnnnnnnnnnnnnnnnnnnnnnnnnnnnnnnnnnnnnnnnnnnnnnnnnnnnnnnnnnnnnnnnnnnnnnnnnnnnnnnnnnnnnnnnnnnnnnnnnnnnnnnnnnnnnnnnnnnnnnnnnnnnnnnnnnnnnnnnnnnnnnnnnnnnnnnnnnnnnnnnnnnnnnnnnnnnnnnnnnnnnnnnnnnnnnnnnnnnnnnnnnnnnnnnnnnnnnnnnnnnnnnnnnnnnnnnnnnnnnnnnnnnnnnnnnnnnnnnnnnnnnnnnnnnnnnnnnnnnnnnnnnnnnnnnnnnnnnnnnnnnnnnnnnnnnnnnnnnnnnnnnnnnnnnnnnnnnnnnnnnnnnnnnnnnnnnnnnnnnnnnnnnnnnnnnnnnnnnnnnnnnnnnnnnnnnnnnnnnnnnnnnnnnnnnnnnnnnnnnnnnnnnnnnnnnnnnnnnnnnnnnnnnnnnnnnnnnnnnnnnnnnnnnnnnnnnnnnnnnnnnnnnnnnnnnnnnnnnnnnnnnnnnnnnnnnnnnnnnnnnnnnnnnnnnnnnnnnnnnnnnnnnnnnnnnnnnnnnnnnnnnnnnnnnnnnnnnnnnnnnnnnnnnnnnnnnnnnnnnnnnnnnnnnnnnnnnnnnnnnnnnnnnnnnnnnnnnnnnnnnnnnnnnnnnnnnnnnnnnnnnnnnnnnnnnnnnnnnnnnnnnnnnnnnnnnnnnnnnnnnnnnnnnnnnnnnnnnnnnnnnnnnnnnnnnnnnnnnnnnnnnnnnnnnnnnnnnnnnnnnnnnnnnnnnnnnnnnnnnnnnnnnnnnnnnnnnnnnnnnnnnnnnnnnnnnnnnnnnnnnnnnnnnnnnnnnnnnnnnnnnnnnnnnnnnnnnnnnnnnnnnnnnnnnnnnnnnnnnnnnnnnnnnnnnnnnnnnnnnnnnnnnnnnnnnnnnnnnnnnnnnnnnnnnnnnnnnnnnnnnnnnnnnnnnnnnnnnnnnnnnnnnnnnnnnnnnnnnnnnnnnnnnnnnnnnnnnnnnnnnnnnnnnnnnnnnnnnnnnnnnnnnnnnnnnnnnnnnnnnnnnnnnnnnnnnnnnnnnnnnnnnnnnnnnnnnnnnnnnnnnnnnnnnnnnnnnnnnnnnnnnnnnnnnnnnnnnnnnnnnnnnnnnnnnnnnnnnnnnnnnnnnnnnnnnnnnnnnnnnnnnnnnnnnnnnnnnnnnnnnnnnnnnnnnnnnnnnnnnnnnnnnnnnnnnnnnnnnnnnnnnnnnnnnnnnnnnnnnnnnnnnnnnnnnnnnnnnnnnnnnnnnnnnnnnnnnnnnnnnnnnnnnnnnnnnnnnnnnnnnnnnnnnnnnnnnnnnnnnnnnnnnnnnnnnnnnnnnnnnnnnnnnnnnnnnnnnnnnnnnnnnnnnnnnnnnnnnnnnnnnnnnnnnnnnnnnnnnnnnnnnnnnnnnnnnnnnnnnnnnnnnnnnnnnnnnnnnnnnnnnnnnnnnnnnnnnnnnnnnnnnnnnnnnnnnnnnnnnnnnnnnnnnnnnnnnnnnnnnnnnnnnnnnnnnnnnnnnnnnnnnnnnnnnnnnnnnnnnnnnnnnnnnnnnnnnnnnnnnnnnnnnnnnnnnnnnnnnnnnnnnnnnnnnnnnnnnnnnnnnnnnnnnnnnnnnnnnnnnnnnnnnnnnnnnnnnnnnnnnnnnnnnnnnnnnnnnnnnnnnnnnnnnnnnnnnnnnnnnnnnnnnnnnnnnnnnnnnnnnnnnnnnnnnnnnnnnnnnnnnnnnnnnnnnnnnnnnnnnnnnnnnnnnnnnnnnnnnnnnnnnnnnnnnnnnnnnnnnnnnnnnnnnnnnnnnnnnnnnnnnnnnnnnnnnnnnnnnnnnnnnnnnnnnnnnnnnnnnnnnnnnnnnnnnnnnnnnnnnnnnnnnnnnnnnnnnnnnnnnnnnnnnnnnnnnnnnnnnnnnnnnnnnnnnnnnnnnnnnnnnnnnnnnnnnnnnnnnnnnnnnnnnnnnnnnnnnnnnnnnnnnnnnnnnnnnnnnnnnnnnnnnnnnnnnnnnnnnnnnnnnnnnnnnnnnnnnnnnnnnnnnnnnnnnnnnnnnnnnnnnnnnnnnnnnnnnnnnnnnnnnnnnnnnnnnnnnnnnnnnnnnnnnnnnnnnnnnnnnnnnnnnnnnnnnnnnnnnnnnnnnnnnnnnnnnnnnnnnnnnnnnnnnnnnnnnnnnnnnnnnnnnnnnnnnnnnnnnnnnnnnnnnnnnnnnnnnnnnnnnnnnnnnnnnnnnnnnnnnnnnnnnnnnnnnnnnnnnnnnnnnnnnnnnnnnnnnnnnnnnnnnnnnnnnnnnnnnnnnnnnnnnnnnnnnnnnnnnnnnnnnnnnnnnnnnnnnnnnnnnnnnnnnnnnnnnnnnnnnnnnnnnnnnnnnnnnnnnnnnnnnnnnnnnnnnnnnnnnnnnnnnnnnnnnnnnnnnnnnnnnnnnnnnnnnnnnnnnnnnnnnnnnnnnnnnnnnnnnnnnnnnnnnnnnnnnnnnnnnnnnnnnnnnnnnnnnnnnnnnnnnnnnnnnnnnnnnnnnnnnnnnnnnnnnnnnnnnnnnnnnnnnnnnnnnnnnnnnnnnnnnnnnnnnnnnnnnnnnnnnnnnnnnnnnnnnnnnnnnnnnnnnnnnnnnnnnnnnnnnnnnnnnnnnnnnnnnnnnnnnnnnnnnnnnnnnnnnnnnnnnnnnnnnnnnnnnnnnnnnnnnnnnnnnnnnnnnnnnnnnnnnnnnnnnnnnnnnnnnnnnnnnnnnnnnnnnnnnnnnnnnnnnnnnnnnnnnnnnnnnnnnnnnnnnnnnnnnnnnnnnnnnnnnnnnnnnnnnnnnnnnnnnnnnnnnnnnnnnnnnnnnnnnnnnnnnnnnnnnnnnnnnnnnnnnnnnnnnnnnnnnnnnnnnnnnnnnnnnnnnnnnnnnnnnnnnnnnnnnnnnnnnnnnnnnnnnnnnnnnnnnnnnnnnnnnnnnnnnnnnnnnnnnnnnnnnnnnnnnnnnnnnnnnnnnnnnnnnnnnnnnnnnnnnnnnnnnnnnnnnnnnnnnnnnnnnnnnnnnnnnnnnnnnnnnnnnnnnnnnnnnnnnnnnnnnnnnnnnnnnnnnnnnnnnnnnnnnnnnnnnnnnnnnnnnnnnnnnnnnnnnnnnnnnnnnnnnnnnnnnnnnnnnnnnnnnnnnnnnnnnnnnnnnnnnnnnnnnnnnnnnnnnnnnnnnnnnnnnnnnnnnnnnnnnnnnnnnnnnnnnnnnnnnnnnnnnnnnnnnnnnnnnnnnnnnnnnnnnnnnnnnnnnnnnnnnnnnnnnnnnnnnnnnnnnnnnnnnnnnnnnnnnnnnnnnnnnnnnnnnnnnnnnnnnnnnnnnnnnnnnnnnnnnnnnnnnnnnnnnnnnnnnnnnnnnnnnnnnnnnnnnnnnnnnnnnnnnnnnnnnnnnnnnnnnnnnnnnnnnnnnnnnnnnnnnnnnnnnnnnnnnnnnnnnnnnnnnnnnnnnnnnnnnnnnnnnnnnnnnnnnnnnnnnnnnnnnnnnnnnnnnnnnnnnnnnnnnnnnnnnnnnnnnnnnnnnnnnnnnnnnnnnnnnnnnnnnnnnnnnnnnnnnnnnnnnnnnnnnnnnnnnnnnnnnnnnnnnnnnnnnnnnnnnnnnnnnnnnnnnnnnnnnnnnnnnnnnnnnnnnnnnnnnnnnnnnnnnnnnnnnnnnnnnnnnnnnnnnnnnnnnnnnnnnnnnnnnnnnnnnnnnnnnnnnnnnnnnnnnnnnnnnnnnnnnnnnnnnnnnnnnnnnnnnnnnnnnnnnnnnnnnnnnnnnnnnnnnnnnnnnnnnnnnnnnnnnnnnnnnnnnnnnnnnnnnnnnnnnnnnnnnnnnnnnnnnnnnnnnnnnnnnnnnnnnnnnnnnnnnnnnnnnnnnnnnnnnnnnnnnnnnnnnnnnnnnnnnnnnnnnnnnnnnnnnnnnnnnnnnnnnnnnnnnnnnnnnnnnnnnnnnnnnnnnnnnnnnnnnnnnnnnnnnnnnnnnnnnnnnnnnnnnnnnnnnnnnnnnnnnnnnnnnnnnnnnnnnnnnnnnnnnnnnnnnnnnnnnnnnnnnnnnnnnnnnnnnnnnnnnnnnnnnnnnnnnnnnnnnnnnnnnnnnnnnnnnnnnnnnnnnnnnnnnnnnnnnnnnnnnnnnnnnnnnnnnnnnnnnnnnnnnnnnnnnnnnnnnnnnnnnnnnnnnnnnnnnnnnnnnnnnnnnnnnnnnnnnnnnnnnnnnnnnnnnnnnnnnnnnnnnnnnnnnnnnnnnnnnnnnnnnnnnnnnnnnnnnnnnnnnnnnnnnnnnnnnnnnnnnnnnnnnnnnnnnnnnnnnnnnnnnnnnnnnnnnnnnnnnnnnnnnnnnnnnnnnnnnnnnnnnnnnnnnnnnnnnnnnnnnnnnnnnnnnnnnnnnnnnnnnnnnnnnnnnnnnnnnnnnnnnnnnnnnnnnnnnnnnnnnnnnnnnnnnnnnnnnnnnnnnnnnnnnnnnnnnnnnnnnnnnnnnnnnnnnnnnnnnnnnnnnnnnnnnnnnnnnnnnnnnnnnnnnnnnnnnnnnnnnnnnnnnnnnnnnnnnnnnnnnnnnnnnnnnnnnnnnnnnnnnnnnnnnnnnnnnnnnnnnnnnnnnnnnnnnnnnnnnnnnnnnnnnnnnnnnnnnnnnnnnnnnnnnnnnnnnnnnnnnnnnnnnnnnnnnnnnnnnnnnnnnnnnnnnnnnnnnnnnnnnnnnnnnnnnnnnnnnnnnnnnnnnnnnnnnnnnnnnnnnnnnnnnnnnnnnnnnnnnnnnnnnnnnnnnnnnnnnnnnnnnnnnnnnnnnnnnnnnnnnnnnnnnnnnnnnnnnnnnnnnnnnnnnnnnnnnnnnnnnnnnnnnnnnnnnnnnnnnnnnnnnnnnnnnnnnnnnnnnnnnnnnnnnnnnnnnnnnnnnnnnnnnnnnnnnnnnnnnnnnnnnnnnnnnnnnnnnnnnnnnnnnnnnnnnnnnnnnnnnnnnnnnnnnnnnnnnnnnnnnnnnnnnnnnnnnnnnnnnnnnnnnnnnnnnnnnnnnnnnnnnnnnnnnnnnnnnnnnnnnnnnnnnnnnnnnnnnnnnnnnnnnnnnnnnnnnnnnnnnnnnnnnnnnnnnnnnnnnnnnnnnnnnnnnnnnnnnnnnnnnnnnnnnnnnnnnnnnnnnnnnnnnnnnnnnnnnnnnnnnnnnnnnnnnnnnnnnnnnnnnnnnnnnnnnnnnnnnnnnnnnnnnnnnnnnnnnnnnnnnnnnnnnnnnnnnnnnnnnnnnnnnnnnnnnnnnnnnnnnnnnnnnnnnnnnnnnnnnnnnnnnnnnnnnnnnnnnnnnnnnnnnnnnnnnnnnnnnnnnnnnnnnnnnnnnnnnnnnnnnnnnnnnnnnnnnnnnnnnnnnnnnnnnnnnnnnnnnnnnnnnnnnnnnnnnnnnnnnnnnnnnnnnnnnnnnnnnnnnnnnnnnnnnnnnnnnnnnnnnnnnnnnnnnnnnnnnnnnnnnnnnnnnnnnnnnnnnnnnnnnnnnnnnnnnnnnnnnnnnnnnnnnnnnnnnnnnnnnnnnnnnnnnnnnnnnnnnnnnnnnnnnnnnnnnnnnnnnnnnnnnnnnnnnnnnnnnnnnnnnnnnnnnnnnnnnnnnnnnnnnnnnnnnnnnnnnnnnnnnnnnnnnnnnnnnnnnnnnnnnnnnnnnnnnnnnnnnnnnnnnnnnnnnnnnnnnnnnnnnnnnnnnnnnnnnnnnnnnnnnnnnnnnnnnnnnnnnnnnnnnnnnnnnnnnnnnnnnnnnnnnnnnnnnnnnnnnnnnnnnnnnnnnnnnnnnnnnnnnnnnnnnnnnnnnnnnnnnnnnnnnnnnnnnnnnnnnnnnnnnnnnnnnnnnnnnnnnnnnnnnnnnnnnnnnnnnnnnnnnnnnnnnnnnnnnnnnnnnnnnnnnnnnnnnnnnnnnnnnnnnnnnnnnnnnnnnnnnnnnnnnnnnnnnnnnnnnnnnnnnnnnnnnnnnnnnnnnnnnnnnnnnnnnnnnnnnnnnnnnnnnnnnnnnnnnnnnnnnnnnnnnnnnnnnnnnnnnnnnnnnnnnnnnnnnnnnnnnnnnnnnnnnnnnnnnnnnnnnnnnnnnnnnnnnnnnnnnnnnnnnnnnnnnnnnnnnnnnnnnnnnnnnnnnnnnnnnnnnnnnnnnnnnnnnnnnnnnnnnnnnnnnnnnnnnnnnnnnnnnnnnnnnnnnnnnnnnnnnnnnnnnnnnnnnnnnnnnnnnnnnnnnnnnnnnnnnnnnnnnnnnnnnnnnnnnnnnnnnnnnnnnnnnnnnnnnnnnnnnnnnnnnnnnnnnnnnnnnnnnnnnnnnnnnnnnnnnnnnnnnnnnnnnnnnnnnnnnnnnnnnnnnnnnnnnnnnnnnnnnnnnnnnnnnnnnnnnnnnnnnnnnnnnnnnnnnnnnnnnnnnnnnnnnnnnnnnnnnnnnnnnnnnnnnnnnnnnnnnnnnnnnnnnnnnnnnnnnnnnnnnnnnnnnnnnnnnnnnnnnnnnnnnnnnnnnnnnnnnnnnnnnnnnnnnnnnnnnnnnnnnnnnnnnnnnnnnnnnnnnnnnnnnnnnnnnnnnnnnnnnnnnnnnnnnnnnnnnnnnnnnnnnnnnnnnnnnnnnnnnnnnnnnnnnnnnnnnnnnnnnnnnnnnnnnnnnnnnnnnnnnnnnnnnnnnnnnnnnnnnnnnnnnnnnnnnnnnnnnnnnnnnnnnnnnnnnnnnnnnnnnnnnnnnnnnnnnnnnnnnnnnnnnnnnnnnnnnnnnnnnnnnnnnnnnnnnnnnnnnnnnnnnnnnnnnnnnnnnnnnnnnnnnnnnnnnnnnnnnnnnnnnnnnnnnnnnnnnnnnnnnnnnnnnnnnnnnnnnnnnnnnnnnnnnnnnnnnnnnnnnnnnnnnnnnnnnnnnnnnnnnnnnnnnnnnnnnnnnnnnnnnnnnnnnnnnnnnnnnnnnnnnnnnnnnnnnnnnnnnnnnnnnnnnnnnnnnnnnnnnnnnnnnnnnnnnnnnnnnnnnnnnnnnnnnnnnnnnnnnnnnnnnnnnnnnnnnnnnnnnnnnnnnnnnnnnnnnnnnnnnnnnnnnnnnnnnnnnnnnnnnnnnnnnnnnnnnnnnnnnnnnnnnnnnnnnnnnnnnnnnnnnnnnnnnnnnnnnnnnnnnnnnnnnnnnnnnnnnnnnnnnnnnnnnnnnnnnnnnnnnnnnnnnnnnnnnnnnnnnnnnnnnnnnnnnnnnnnnnnnnnnnnnnnnnnnnnnnnnnnnnnnnnnnnnnnnnnnnnnnnnnnnnnnnnnnnnnnnnnnnnnnnnnnnnnnnnnnnnnnnnnnnnnnnnnnnnnnnnnnnnnnnnnnnnnnnnnnnnnnnnnnnnnnnnnnnnnnnnnnnnnnnnnnnnnnnnnnnnnnnnnnnnnnnnnnnnnnnnnnnnnnnnnnnnnnnnnnnnnnnnnnnnnnnnnnnnnnnnnnnnnnnnnnnnnnnnnnnnnnnnnnnnnnnnnnnnnnnnnnnnnnnnnnnnnnnnnnnnnnnnnnnnnnnnnnnnnnnnnnnnnnnnnnnnnnnnnnnnnnnnnnnnnnnnnnnnnnnnnnnnnnnnnnnnnnnnnnnnnnnnnnnnnnnnnnnnnnnnnnnnnnnnnnnnnnnnnnnnnnnnnnnnnnnnnnnnnnnnnnnnnnnnnnnnnnnnnnnnnnnnnnnnnnnnnnnnnnnnnnnnnnnnnnnnnnnnnnnnnnnnnnnnnnnnnnnnnnnnnnnnnnnnnnnnnnnnnnnnnnnnnnnnnnnnnnnnnnnnnnnnnnnnnnnnnnnnnnnnnnnnnnnnnnnnnnnnnnnnnnnnnnnnnnnnnnnnnnnnnnnnnnnnnnnnnnnnnnnnnnnnnnnnnnnnnnnnnnnnnnnnnnnnnnnnnnnnnnnnnnnnnnnnnnnnnnnnnnnnnnnnnnnnnnnnnnnnnnnnnnnnnnnnnnnnnnnnnnnnnnnnnnnnnnnnnnnnnnnnnnnnnnnnnnnnnnnnnnnnnnnnnnnnnnnnnnnnnnnnnnnnnnnnnnnnnnnnnnnnnnnnnnnnnnnnnnnnnnnnnnnnnnnnnnnnnnnnnnnnnnnnnnnnnnnnnnnnnnnnnnnnnnnnnnnnnnnnnnnnnnnnnnnnnnnnnnnnnnnnnnnnnnnnnnnnnnnnnnnnnnnnnnnnnnnnnnnnnnnnnnnnnnnnnnnnnnnnnnnnnnnnnnnnnnnnnnnnnnnnnnnnnnnnnnnnnnnnnnnnnnnnnnnnnnnnnnnnnnnnnnnnnnnnnnnnnnnnnnnnnnnnnnnnnnnnnnnnnnnnnnnnnnnnnnnnnnnnnnnnnnnnnnnnnnnnnnnnnnnnnnnnnnnnnnnnnnnnnnnnnnnnnnnnnnnnnnnnnnnnnnnnnnnnnnnnnnnnnnnnnnnnnnnnnnnnnnnnnnnnnnnnnnnnnnnnnnnnnnnnnnnnnnnnnnnnnnnnnnnnnnnnnnnnnnnnnnnnnnnnnnnnnnnnnnnnnnnnnnnnnnnnnnnnnnnnnnnnnnnnnnnnnnnnnnnnnnnnnnnnnnnnnnnnnnnnnnnnnnnnnnnnnnnnnnnnnnnnnnnnnnnnnnnnnnnnnnnnnnnnnnnnnnnnnnnnnnnnnnnnnnnnnnnnnnnnnnnnnnnnnnnnnnnnnnnnnnnnnnnnnnnnnnnnnnnnnnnnnnnnnnnnnnnnnnnnnnnnnnnnnnnnnnnnnnnnnnnnnnnnnnnnnnnnnnnnnnnnnnnnnnnnnnnnnnnnnnnnnnnnnnnnnnnnnnnnnnnnnnnnnnnnnnnnnnnnnnnnnnnnnnnnnnnnnnnnnnnnnnnnnnnnnnnnnnnnnnnnnnnnnnnnnnnnnnnnnnnnnnnnnnnnnnnnnnnnnnnnnnnnnnnnnnnnnnnnnnnnnnnnnnnnnnnnnnnnnnnnnnnnnnnnnnnnnnnnnnnnnnnnnnnnnnnnnnnnnnnnnnnnnnnnnnnnnnnnnnnnnnnnnnnnnnnnnnnnnnnnnnnnnnnnnnnnnnnnnnnnnnnnnnnnnnnnnnnnnnnnnnnnnnnnnnnnnnnnnnnnnnnnnnnnnnnnnnnnnnnnnnnnnnnnnnnnnnnnnnnnnnnnnnnnnnnnnnnnnnnnnnnnnnnnnnnnnnnnnnnnnnnnnnnnnnnnnnnnnnnnnnnnnnnnnnnnnnnnnnnnnnnnnnnnnnnnnnnnnnnnnnnnnnnnnnnnnnnnnnnnnnnnnnnnnnnnnnnnnnnnnnnnnnnnnnnnnnnnnnnnnnnnnnnnnnnnnnnnnnnnnnnnnnnnnnnnnnnnnnnnnnnnnnnnnnnnnnnnnnnnnnnnnnnnnnnnnnnnnnnnnnnnnnnnnnnnnnnnnnnnnnnnnnnnnnnnnnnnnnnnnnnnnnnnnnnnnnnnnnnnnnnnnnnnnnnnnnnnnnnnnnnnnnnnnnnnnnnnnnnnnnnnnnnnnnnnnnnnnnnnnnnnnnnnnnnnnnnnnnnnnnnnnnnnnnnnnnnnnnnnnnnnnnnnnnnnnnnnnnnnnnnnnnnnnnnnnnnnnnnnnnnnnnnnnnnnnnnnnnnnnnnnnnnnnnnnnnnnnnnnnnnnnnnnnnnnnnnnnnnnnnnnnnnnnnnnnnnnnnnnnnnnnnnnnnnnnnnnnnnnnnnnnnnnnnnnnnnnnnnnnnnnnnnnnnnnnnnnnnnnnnnnnnnnnnnnnnnnnnnnnnnnnnnnnnnnnnnnnnnnnnnnnnnnnnnnnnnnnnnnnnnnnnnnnnnnnnnnnnnnnnnnnnnnnnnnnnnnnnnnnnnnnnnnnnnnnnnnnnnnnnnnnnnnnnnnnnnnnnnnnnnnnnnnnnnnnnnnnnnnnnnnnnnnnnnnnnnnnnnnnnnnnnnnnnnnnnnnnnnnnnnnnnnnnnnnnnnnnnnnnnnnnnnnnnnnnnnnnnnnnnnnnnnnnnnnnnnnnnnnnnnnnnnnnnnnnnnnnnnnnnnnnnnnnnnnnnnnnnnnnnnnnnnnnnnnnnnnnnnnnnnnnnnnnnnnnnnnnnnnnnnnnnnnnnnnnnnnnnnnnnnnnnnnnnnnnnnnnnnnnnnnnnnnnnnnnnnnnnnnnnnnnnnnnnnnnnnnnnnnnnnnnnnnnnnnnnnnnnnnnnnnnnnnnnnnnnnnnnnnnnnnnnnnnnnnnnnnnnnnnnnnnnnnnnnnnnnnnnnnnnnnnnnnnnnnnnnnnnnnnnnnnnnnnnnnnnnnnnnnnnnnnnnnnnnnnnnnnnnnnnnnnnnnnnnnnnnnnnnnnnnnnnnnnnnnnnnnnnnnnnnnnnnnnnnnnnnnnnnnnnnnnnnnnnnnnnnnnnnnnnnnnnnnnnnnnnnnnnnnnnnnnnnnnnnnnnnnnnnnnnnnnnnnnnnnnnnnnnnnnnnnnnnnnnnnnnnnnnnnnnnnnnnnnnnnnnnnnnnnnnnnnnnnnnnnnnnnnnnnnnnnnnnnnnnnnnnnnnnnnnnnnnnnnnnnnnnnnnnnnnnnnnnnnnnnnnnnnnnnnnnnnnnnnnnnnnnnnnnnnnnnnnnnnnnnnnnnnnnnnnnnnnnnnnnnnnnnnnnnnnnnnnnnnnnnnnnnnnnnnnnnnnnnnnnnnnnnnnnnnnnnnnnnnnnnnnnnnnnnnnnnnnnnnnnnnnnnnnnnnnnnnnnnnnnnnnnnnnnnnnnnnnnnnnnnnnnnnnnnnnnnnnnnnnnnnnnnnnnnnnnnnnnnnnnnnnnnnnnnnnnnnnnnnnnnnnnnnnnnnnnnnnnnnnnnnnnnnnnnnnnnnnnnnnnnnnnnnnnnnnnnnnnnnnnnnnnnnnnnnnnnnnnnnnnnnnnnnnnnnnnnnnnnnnnnnnnnnnnnnnnnnnnnnnnnnnnnnnnnnnnnnnnnnnnnnnnnnnnnnnnnnnnnnnnnnnnnnnnnnnnnnnnnnnnnnnnnnnnnnnnnnnnnnnnnnnnnnnnnnnnnnnnnnnnnnnnnnnnnnnnnnnnnnnnnnnnnnnnnnnnnnnnnnnnnnnnnnnnnnnnnnnnnnnnnnnnnnnnnnnnnnnnnnnnnnnnnnnnnnnnnnnnnnnnnnnnnnnnnnnnnnnnnnnnnnnnnnnnnnnnnnnnnnnnnnnnnnnnnnnnnnnnnnnnnnnnnnnnnnnnnnnnnnnnnnnnnnnnnnnnnnnnnnnnnnnnnnnnnnnnnnnnnnnnnnnnnnnnnnnnnnnnnnnnnnnnnnnnnnnnnnnnnnnnnnnnnnnnnnnnnnnnnnnnnnnnnnnnnnnnnnnnnnnnnnnnnnnnnnnnnnnnnnnnnnnnnnnnnnnnnnnnnnnnnnnnnnnnnnnnnnnnnnnnnnnnnnnnnnnnnnnnnnnnnnnnnnnnnnnnnnnnnnnnnnnnnnnnnnnnnnnnnnnnnnnnnnnnnnnnnnnnnnnnnnnnnnnnnnnnnnnnnnnnnnnnnnnnnnnnnnnnnnnnnnnnnnnnnnnnnnnnnnnnnnnnnnnnnnnnnnnnnnnnnnnnnnnnnnnnnnnnnnnnnnnnnnnnnnnnnnnnnnnnnnnnnnnnnnnnnnnnnnnnnnnnnnnnnnnnnnnnnnnnnnnnnnnnnnnnnnnnnnnnnnnnnnnnnnnnnnnnnnnnnnnnnnnnnnnnnnnnnnnnnnnnnnnnnnnnnnnnnnnnnnnnnnnnnnnnnnnnnnnnnnnnnnnnnnnnnnnnnnnnnnnnnnnnnnnnnnnnnnnnnnnnnnnnnnnnnnnnnnnnnnnnnnnnnnnnnnnnnnnnnnnnnnnnnnnnnnnnnnnnnnnnnnnnnnnnnnnnnnnnnnnnnnnnnnnnnnnnnnnnnnnnnnnnnnnnnnnnnnnnnnnnnnnnnnnnnnnnnnnnnnnnnnnnnnnnnnnnnnnnnnnnnnnnnnnnnnnnnnnnnnnnnnnnnnnnnnnnnnnnnnnnnnnnnnnnnnnnnnnnnnnnnnnnnnnnnnnnnnnnnnnnnnnnnnnnnnnnnnnnnnnnnnnnnnnnnnnnnnnnnnnnnnnnnnnnnnnnnnnnnnnnnnnnnnnnnnnnnnnnnnnnnnnnnnnnnnnnnnnnnnnnnnnnnnnnnnnnnnnnnnnnnnnnnnnnnnnnnnnnnnnnnnnnnnnnnnnnnnnnnnnnnnnnnnnnnnnnnnnnnnnnnnnnnnnnnnnnnnnnnnnnnnnnnnnnnnnnnnnnnnnnnnnnnnnnnnnnnnnnnnnnnnnnnnnnnnnnnnnnnnnnnnnnnnnnnnnnnnnnnnnnnnnnnnnnnnnnnnnnnnnnnnnnnnnnnnnnnnnnnnnnnnnnnnnnnnnnnnnnnnnnnnnnnnnnnnnnnnnnnnnnnnnnnnnnnnnnnnnnnnnnnnnnnnnnnnnnnnnnnnnnnnnnnnnnnnnnnnnnnnnnnnnnnnnnnnnnnnnnnnnnnnnnnnnnnnnnnnnnnnnnnnnnnnnnnnnnnnnnnnnnnnnnnnnnnnnnnnnnnnnnnnnnnnnnnnnnnnnnnnnnnnnnnnnnnnnnnnnnnnnnnnnnnnnnnnnnnnnnnnnnnnnnnnnnnnnnnnnnnnnnnnnnnnnnnnnnnnnnnnnnnnnnnnnnnnnnnnnnnnnnnnnnnnnnnnnnnnnnnnnnnnnnnnnnnnnnnnnnnnnnnnnnnnnnnnnnnnnnnnnnnnnnnnnnnnnnnnnnnnnnnnnnnnnnnnnnnnnnnnnnnnnnnnnnnnnnnnnnnnnnnnnnnnnnnnnnnnnnnnnnnnnnnnnnnnnnnnnnnnnnnnnnnnnnnnnnnnnnnnnnnnnnnnnnnnnnnnnnnnnnnnnnnnnnnnnnnnnnnnnnnnnnnnnnnnnnnnnnnnnnnnnnnnnnnnnnnnnnnnnnnnnnnnnnnnnnnnnnnnnnnnnnnnnnnnnnnnnnnnnnnnnnnnnnnnnnnnnnnnnnnnnnnnnnnnnnnnnnnnnnnnnnnnnnnnnnnnnnnnnnnnnnnnnnnnnnnnnnnnnnnnnnnnnnnnnnnnnnnnnnnnnnnnnnnnnnnnnnnnnnnnnnnnnnnnnnnnnnnnnnnnnnnnnnnnnnnnnnnnnnnnnnnnnnnnnnnnnnnnnnnnnnnnnnnnnnnnnnnnnnnnnnnnnnnnnnnnnnnnnnnnnnnnnnnnnnnnnnnnnnnnnnnnnnnnnnnnnnnnnnnnnnnnnnnnnnnnnnnnnnnnnnnnnnnnnnnnnnnnnnnnnnnnnnnnnnnnnnnnnnnnnnnnnnnnnnnnnnnnnnnnnnnnnnnnnnnnnnnnnnnnnnnnnnnnnnnnnnnnnnnnnnnnnnnnnnnnnnnnnnnnnnnnnnnnnnnnnnnnnnnnnnnnnnnnnnnnnnnnnnnnnnnnnnnnnnnnnnnnnnnnnnnnnnnnnnnnnnnnnnnnnnnnnnnnnnnnnnnnnnnnnnnnnnnnnnnnnnnnnnnnnnnnnnnnnnnnnnnnnnnnnnnnnnnnnnnnnnnnnnnnnnnnnnnnnnnnnnnnnnnnnnnnnnnnnnnnnnnnnnnnnnnnnnnnnnnnnnnnnnnnnnnnnnnnnnnnnnnnnnnnnnnnnnnnnnnnnnnnnnnnnnnnnnnnnnnnnnnnnnnnnnnnnnnnnnnnnnnnnnnnnnnnnnnnnnnnnnnnnnnnnnnnnnnnnnnnnnnnnnnnnnnnnnnnnnnnnnnnnnnnnnnnnnnnnnnnnnnnnnnnnnnnnnnnnnnnnnnnnnnnnnnnnnnnnnnnnnnnnnnnnnnnnnnnnnnnnnnnnnnnnnnnnnnnnnnnnnnnnnnnnnnnnnnnnnnnnnnnnnnnnnnnnnnnnnnnnnnnnnnnnnnnnnnnnnnnnnnnnnnnnnnnnnnnnnnnnnnnnnnnnnnnnnnnnnnnnnnnnnnnnnnnnnnnnnnnnnnnnnnnnnnnnnnnnnnnnnnnnnnnnnnnnnnnnnnnnnnnnnnnnnnnnnnnnnnnnnnnnnnnnnnnnnnnnnnnnnnnnnnnnnnnnnnnnnnnnnnnnnnnnnnnnnnnnnnnnnnnnnnnnnnnnnnnnnnnnnnnnnnnnnnnnnnnnnnnnnnnnnnnnnnnnnnnnnnnnnnnnnnnnnnnnnnnnnnnnnnnnnnnnnnnnnnnnnnnnnnnnnnnnnnnnnnnnnnnnnnnnnnnnnnnnnnnnnnnnnnnnnnnnnnnnnnnnnnnnnnnnnnnnnnnnnnnnnnnnnnnnnnnnnnnnnnnnnnnnnnnnnnnnnnnnnnnnnnnnnnnnnnnnnnnnnnnnnnnnnnnnnnnnnnnnnnnnnnnnnnnnnnnnnnnnnnnnnnnnnnnnnnnnnnnnnnnnnnnnnnnnnnnnnnnnnnnnnnnnnnnnnnnnnnnnnnnnnnnnnnnnnnnnnnnnnnnnnnnnnnnnnnnnnnnnnnnnnnnnnnnnnnnnnnnnnnnnnnnnnnnnnnnnnnnnnnnnnnnnnnnnnnnnnnnnnnnnnnnnnnnnnnnnnnnnnnnnnnnnnnnnnnnnnnnnnnnnnnnnnnnnnnnnnnnnnnnnnnnnnnnnnnnnnnnnnnnnnnnnnnnnnnnnnnnnnnnnnnnnnnnnnnnnnnnnnnnnnnnnnnnnnnnnnnnnnnnnnnnnnnnnnnnnnnnnnnnnnnnnnnnnnnnnnnnnnnnnnnnnnnnnnnnnnnnnnnnnnnnnnnnnnnnnnnnnnnnnnnnnnnnnnnnnnnnnnnnnnnnnnnnnnnnnnnnnnnnnnnnnnnnnnnnnnnnnnnnnnnnnnnnnnnnnnnnnnnnnnnnnnnnnnnnnnnnnnnnnnnnnnnnnnnnnnnnnnnnnnnnnnnnnnnnnnnnnnnnnnnnnnnnnnnnnnnnnnnnnnnnnnnnnnnnnnnnnnnnnnnnnnnnnnnnnnnnnnnnnnnnnnnnnnnnnnnnnnnnnnnnnnnnnnnnnnnnnnnnnnnnnnnnnnnnnnnnnnnnnnnnnnnnnnnnnnnnnnnnnnnnnnnnnnnnnnnnnnnnnnnnnnnnnnnnnnnnnnnnnnnnnnnnnnnnnnnnnnnnnnnnnnnnnnnnnnnnnnnnnnnnnnnnnnnnnnnnnnnnnnnnnnnnnnnnnnnnnnnnnnnnnnnnnnnnnnnnnnnnnnnnnnnnnnnnnnnnnnnnnnnnnnnnnnnnnnnnnnnnnnnnnnnnnnnnnnnnnnnnnnnnnnnnnnnnnnnnnnnnnnnnnnnnnnnnnnnnnnnnnnnnnnnnnnnnnnnnnnnnnnnnnnnnnnnnnnnnnnnnnnnnnnnnnnnnnnnnnnnnnnnnnnnnnnnnnnnnnnnnnnnnnnnnnnnnnnnnnnnnnnnnnnnnnnnnnnnnnnnnnnnnnnnnnnnnnnnnnnnnnnnnnnnnnnnnnnnnnnnnnnnnnnnnnnnnnnnnnnnnnnnnnnnnnnnnnnnnnnnnnnnnnnnnnnnnnnnnnnnnnnnnnnnnnnnnnnnnnnnnnnnnnnnnnnnnnnnnnnnnnnnnnnnnnnnnnnnnnnnnnnnnnnnnnnnnnnnnnnnnnnnnnnnnnnnnnnnnnnnnnnnnnnnnnnnnnnnnnnnnnnnnnnnnnnnnnnnnnnnnnnnnnnnnnnnnnnnnnnnnnnnnnnnnnnnnnnnnnnnnnnnnnnnnnnnnnnnnnnnnnnnnnnnnnnnnnnnnnnnnnnnnnnnnnnnnnnnnnnnnnnnnnnnnnnnnnnnnnnnnnnnnnnnnnnnnnnnnnnnnnnnnnnnnnnnnnnnnnnnnnnnnnnnnnnnnnnnnnnnnnnnnnnnnnnnnnnnnnnnnnnnnnnnnnnnnnnnnnnnnnnnnnnnnnnnnnnnnnnnnnnnnnnnnnnnnnnnnnnnnnnnnnnnnnnnnnnnnnnnnnnnnnnnnnnnnnnnnnnnnnnnnnnnnnnnnnnnnnnnnnnnnnnnnnnnnnnnnnnnnnnnnnnnnnnnnnnnnnnnnnnnnnnnnnnnnnnnnnnnnnnnnnnnnnnnnnnnnnnnnnnnnnnnnnnnnnnnnnnnnnnnnnnnnnnnnnnnnnnnnnnnnnnnnnnnnnnnnnnnnnnnnnnnnnnnnnnnnnnnnnnnnnnnnnnnnnnnnnnnnnnnnnnnnnnnnnnnnnnnnnnnnnnnnnnnnnnnnnnnnnnnnnnnnnnnnnnnnnnnnnnnnnnnnnnnnnnnnnnnnnnnnnnnnnnnnnnnnnnnnnnnnnnnnnnnnnnnnnnnnnnnnnnnnnnnnnnnnnnnnnnnnnnnnnnnnnnnnnnnnnnnnnnnnnnnnnnnnnnnnnnnnnnnnnnnnnnnnnnnnnnnnnnnnnnnnnnnnnnnnnnnnnnnnnnnnnnnnnnnnnnnnnnnnnnnnnnnnnnnnnnnnnnnnnnnnnnnnnnnnnnnnnnnnnnnnnnnnnnnnnnnnnnnnnnnnnnnnnnnnnnnnnnnnnnnnnnnnnnnnnnnnnnnnnnnnnnnnnnnnnnnnnnnnnnnnnnnnnnnnnnnnnnnnnnnnnnnnnnnnnnnnnnnnnnnnnnnnnnnnnnnnnnnnnnnnnnnnnnnnnnnnnnnnnnnnnnnnnnnnnnnnnnnnnnnnnnnnnnnnnnnnnnnnnnnnnnnnnnnnnnnnnnnnnnnnnnnnnnnnnnnnnnnnnnnnnnnnnnnnnnnnnnnnnnnnnnnnnnnnnnnnnnnnnnnnnnnnnnnnnnnnnnnnnnnnnnnnnnnnnnnnnnnnnnnnnnnnnnnnnnnnnnnnnnnnnnnnnnnnnnnnnnnnnnnnnnnnnnnnnnnnnnnnnnnnnnnnnnnnnnnnnnnnnnnnnnnnnnnnnnnnnnnnnnnnnnnnnnnnnnnnnnnnnnnnnnnnnnnnnnnnnnnnnnnnnnnnnnnnnnnnnnnnnnnnnnnnnnnnnnnnnnnnnnnnnnnnnnnnnnnnnnnnnnnnnnnnnnnnnnnnnnnnnnnnnnnnnnnnnnnnnnnnnnnnnnnnnnnnnnnnnnnnnnnnnnnnnnnnnnnnnnnnnnnnnnnnnnnnnnnnnnnnnnnnnnnnnnnnnnnnnnnnnnnnnnnnnnnnnnnnnnnnnnnnnnnnnnnnnnnnnnnnnnnnnnnnnnnnnnnnnnnnnnnnnnnnnnnnnnnnnnnnnnnnnnnnnnnnnnnnnnnnnnnnnnnnnnnnnnnnnnnnnnnnnnnnnnnnnnnnnnnnnnnnnnnnnnnnnnnnnnnnnnnnnnnnnnnnnnnnnnnnnnnnnnnnnnnnnnnnnnnnnnnnnnnnnnnnnnnnnnnnnnnnnnnnnnnnnnnnnnnnnnnnnnnnnnnnnnnnnnnnnnnnnnnnnnnnnnnnnnnnnnnnnnnnnnnnnnnnnnnnnnnnnnnnnnnnnnnnnnnnnnnnnnnnnnnnnnnnnnnnnnnnnnnnnnnnnnnnnnnnnnnnnnnnnnnnnnnnnnnnnnnnnnnnnnnnnnnnnnnnnnnnnnnnnnnnnnnnnnnnnnnnnnnnnnnnnnnnnnnnnnnnnnnnnnnnnnnnnnnnnnnnnnnnnnnnnnnnnnnnnnnnnnnnnnnnnnnnnnnnnnnnnnnnnnnnnnnnnnnnnnnnnnnnnnnnnnnnnnnnnnnnnnnnnnnnnnnnnnnnnnnnnnnnnnnnnnnnnnnnnnnnnnnnnnnnnnnnnnnnnnnnnnnnnnnnnnnnnnnnnnnnnnnnnnnnnnnnnnnnnnnnnnnnnnnnnnnnnnnnnnnnnnnnnnnnnnnnnnnnnnnnnnnnnnnnnnnnnnnnnnnnnnnnnnnnnnnnnnnnnnnnnnnnnnnnnnnnnnnnnnnnnnnnnnnnnnnnnnnnnnnnnnnnnnnnnnnnnnnnnnnnnnnnnnnnnnnnnnnnnnnnnnnnnnnnnnnnnnnnnnnnnnnnnnnnnnnnnnnnnnnnnnnnnnnnnnnnnnnnnnnnnnnnnnnnnnnnnnnnnnnnnnnnnnnnnnnnnnnnnnnnnnnnnnnnnnnnnnnnnnnnnnnnnnnnnnnnnnnnnnnnnnnnnnnnnnnnnnnnnnnnnnnnnnnnnnnnnnnnnnnnnnnnnnnnnnnnnnnnnnnnnnnnnnnnnnnnnnnnnnnnnnnnnnnnnnnnnnnnnnnnnnnnnnnnnnnnnnnnnnnnnnnnnnnnnnnnnnnnnnnnnnnnnnnnnnnnnnnnnnnnnnnnnnnnnnnnnnnnnnnnnnnnnnnnnnnnnnnnnnnnnnnnnnnnnnnnnnnnnnnnnnnnnnnnnnnnnnnnnnnnnnnnnnnnnnnnnnnnnnnnnnnnnnnnnnnnnnnnnnnnnnnnnnnnnnnnnnnnnnnnnnnnnnnnnnnnnnnnnnnnnnnnnnnnnnnnnnnnnnnnnnnnnnnnnnnnnnnnnnnnnnnnnnnnnnnnnnnnnnnnnnnnnnnnnnnnnnnnnnnnnnnnnnnnnnnnnnnnnnnnnnnnnnnnnnnnnnnnnnnnnnnnnnnnnnnnnnnnnnnnnnnnnnnnnnnnnnnnnnnnnnnnnnnnnnnnnnnnnnnnnnnnnnnnnnnnnnnnnnnnnnnnnnnnnnnnnnnnnnnnnnnnnnnnnnnnnnnnnnnnnnnnnnnnnnnnnnnnnnnnnnnnnnnnnnnnnnnnnnnnnnnnnnnnnnnnnnnnnnnnnnnnnnnnnnnnnnnnnnnnnnnnnnnnnnnnnnnnnnnnnnnnnnnnnnnnnnnnnnnnnnnnnnnnnnnnnnnnnnnnnnnnnnnnnnnnnnnnnnnnnnnnnnnnnnnnnnnnnnnnnnnnnnnnnnnnnnnnnnnnnnnnnnnnnnnnnnnnnnnnnnnnnnnnnnnnnnnnnnnnnnnnnnnnnnnnnnnnnnnnnnnnnnnnnnnnnnnnnnnnnnnnnnnnnnnnnnnnnnnnnnnnnnnnnnnnnnnnnnnnnnnnnnnnnnnnnnnnnnnnnnnnnnnnnnnnnnnnnnnnnnnnnnnnnnnnnnnnnnnnnnnnnnnnnnnnnnnnnnnnnnnnnnnnnnnnnnnnnnnnnnnnnnnnnnnnnnnnnnnnnnnnnnnnnnnnnnnnnnnnnnnnnnnnnnnnnnnnnnnnnnnnnnnnnnnnnnnnnnnnnnnnnnnnnnnnnnnnnnnnnnnnnnnnnnnnnnnnnnnnnnnnnnnnnnnnnnnnnnnnnnnnnnnnnnnnnnnnnnnnnnnnnnnnnnnnnnnnnnnnnnnnnnnnnnnnnnnnnnnnnnnnnnnnnnnnnnnnnnnnnnnnnnnnnnnnnnnnnnnnnnnnnnnnnnnnnnnnnnnnnnnnnnnnnnnnnnnnnnnnnnnnnnnnnnnnnnnnnnnnnnnnnnnnnnnnnnnnnnnnnnnnnnnnnnnnnnnnnnnnnnnnnnnnnnnnnnnnnnnnnnnnnnnnnnnnnnnnnnnnnnnnnnnnnnnnnnnnnnnnnnnnnnnnnnnnnnnnnnnnnnnnnnnnnnnnnnnnnnnnnnnnnnnnnnnnnnnnnnnnnnnnnnnnnnnnnnnnnnnnnnnnnnnnnnnnnnnnnnnnnnnnnnnnnnnnnnnnnnnnnnnnnnnnnnnnnnnnnnnnnnnnnnnnnnnnnnnnnnnnnnnnnnnnnnnnnnnnnnnnnnnnnnnnnnnnnnnnnnnnnnnnnnnnnnnnnnnnnnnnnnnnnnnnnnnnnnnnnnnnnnnnnnnnnnnnnnnnnnnnnnnnnnnnnnnnnnnnnnnnnnnnnnnnnnnnnnnnnnnnnnnnnnnnnnnnnnnnnnnnnnnnnnnnnnnnnnnnnnnnnnnnnnnnnnnnnnnnnnnnnnnnnnnnnnnnnnnnnnnnnnnnnnnnnnnnnnnnnnnnnnnnnnnnnnnnnnnnnnnnnnnnnnnnnnnnnnnnnnnnnnnnnnnnnnnnnnnnnnnnnnnnnnnnnnnnnnnnnnnnnnnnnnnnnnnnnnnnnnnnnnnnnnnnnnnnnnnnnnnnnnnnnnnnnnnnnnnnnnnnnnnnnnnnnnnnnnnnnnnnnnnnnnnnnnnnnnnnnnnnnnnnnnnnnnnnnnnnnnnnnnnnnnnnnnnnnnnnnnnnnnnnnnnnnnnnnnnnnnnnnnnnnnnnnnnnnnnnnnnnnnnnnnnnnnnnnnnnnnnnnnnnnnnnnnnnnnnnnnnnnnnnnnnnnnnnnnnnnnnnnnnnnnnnnnnnnnnnnnnnnnnnnnnnnnnnnnnnnnnnnnnnnnnnnnnnnnnnnnnnnnnnnnnnnnnnnnnnnnnnnnnnnnnnnnnnnnnnnnnnnnnnnnnnnnnnnnnnnnnnnnnnnnnnnnnnnnnnnnnnnnnnnnnnnnnnnnnnnnnnnnnnnnnnnnnnnnnnnnnnnnnnnnnnnnnnnnnnnnnnnnnnnnnnnnnnnnnnnnnnnnnnnnnnnnnnnnnnnnnnnnnnnnnnnnnnnnnnnnnnnnnnnnnnnnnnnnnnnnnnnnnnnnnnnnnnnnnnnnnnnnnnnnnnnnnnnnnnnnnnnnnnnnnnnnnnnnnnnnnnnnnnnnnnnnnnnnnnnnnnnnnnnnnnnnnnnnnnnnnnnnnnnnnnnnnnnnnnnnnnnnnnnnnnnnnnnnnnnnnnnnnnnnnnnnnnnnnnnnnnnnnnnnnnnnnnnnnnnnnnnnnnnnnnnnnnnnnnnnnnnnnnnnnnnnnnnnnnnnnnnnnnnnnnnnnnnnnnnnnnnnnnnnnnnnnnnnnnnnnnnnnnnnnnnnnnnnnnnnnnnnnnnnnnnnnnnnnnnnnnnnnnnnnnnnnnnnnnnnnnnnnnnnnnnnnnnnnnnnnnnnnnnnnnnnnnnnnnnnnnnnnnnnnnnnnnnnnnnnnnnnnnnnnnnnnnnnnnnnnnnnnnnnnnnnnnnnnnnnnnnnnnnnnnnnnnnnnnnnnnnnnnnnnnnnnnnnnnnnnnnnnnnnnnnnnnnnnnnnnnnnnnnnnnnnnnnnnnnnnnnnnnnnnnnnnnnnnnnnnnnnnnnnnnnnnnnnnnnnnnnnnnnnnnnnnnnnnnnnnnnnnnnnnnnnnnnnnnnnnnnnnnnnnnnnnnnnnnnnnnnnnnnnnnnnnnnnnnnnnnnnnnnnnnnnnnnnnnnnnnnnnnnnnnnnnnnnnnnnnnnnnnnnnnnnnnnnnnnnnnnnnnnnnnnnnnnnnnnnnnnnnnnnnnnnnnnnnnnnnnnnnnnnnnnnnnnnnnnnnnnnnnnnnnnnnnnnnnnnnnnnnnnnnnnnnnnnnnnnnnnnnnnnnnnnnnnnnnnnnnnnnnnnnnnnnnnnnnnnnnnnnnnnnnnnnnnnnnnnnnnnnnnnnnnnnnnnnnnnnnnnnnnnnnnnnnnnnnnnnnnnnnnnnnnnnnnnnnnnnnnnnnnnnnnnnnnnnnnnnnnnnnnnnnnnnnnnnnnnnnnnnnnnnnnnnnnnnnnnnnnnnnnnnnnnnnnnnnnnnnnnnnnnnnnnnnnnnnnnnnnnnnnnnnnnnnnnnnnnnnnnnnnnnnnnnnnnnnnnnnnnnnnnnnnnnnnnnnnnnnnnnnnnnnnnnnnnnnnnnnnnnnnnnnnnnnnnnnnnnnnnnnnnnnnnnnnnnnnnnnnnnnnnnnnnnnnnnnnnnnnnnnnnnnnnnnnnnnnnnnnnnnnnnnnnnnnnnnnnnnnnnnnnnnnnnnnnnnnnnnnnnnnnnnnnnnnnnnnnnnnnnnnnnnnnnnnnnnnnnnnnnnnnnnnnnnnnnnnnnnnnnnnnnnnnnnnnnnnnnnnnnnnnnnnnnnnnnnnnnnnnnnnnnnnnnnnnnnnnnnnnnnnnnnnnnnnnnnnnnnnnnnnnnnnnnnnnnnnnnnnnnnnnnnnnnnnnnnnnnnnnnnnnnnnnnnnnnnnnnnnnnnnnnnnnnnnnnnnnnnnnnnnnnnnnnnnnnnnnnnnnnnnnnnnnnnnnnnnnnnnnnnnnnnnnnnnnnnnnnnnnnnnnnnnnnnnnnnnnnnnnnnnnnnnnnnnnnnnnnnnnnnnnnnnnnnnnnnnnnnnnnnnnnnnnnnnnnnnnnnnnnnnnnnnnnnnnnnnnnnnnnnnnnnnnnnnnnnnnnnnnnnnnnnnnnnnnnnnnnnnnnnnnnnnnnnnnnnnnnnnnnnnnnnnnnnnnnnnnnnnnnnnnnnnnnnnnnnnnnnnnnnnnnnnnnnnnnnnnnnnnnnnnnnnnnnnnnnnnnnnnnnnnnnnnnnnnnnnnnnnnnnnnnnnnnnnnnnnnnnnnnnnnnnnnnnnnnnnnnnnnnnnnnnnnnnnnnnnnnnnnnnnnnnnnnnnnnnnnnnnnnnnnnnnnnnnnnnnnnnnnnnnnnnnnnnnnnnnnnnnnnnnnnnnnnnnnnnnnnnnnnnnnnnnnnnnnnnnnnnnnnnnnnnnnnnnnnnnnnnnnnnnnnnnnnnnnnnnnnnnnnnnnnnnnnnnnnnnnnnnnnnnnnnnnnnnnnnnnnnnnnnnnnnnnnnnnnnnnnnnnnnnnnnnnnnnnnnnnnnnnnnnnnnnnnnnnnnnnnnnnnnnnnnnnnnnnnnnnnnnnnnnnnnnnnnnnnnnnnnnnnnnnnnnnnnnnnnnnnnnnnnnnnnnnnnnnnnnnnnnnnnnnnnnnnnnnnnnnnnnnnnnnnnnnnnnnnnnnnnnnnnnnnnnnnnnnnnnnnnnnnnnnnnnnnnnnnnnnnnnnnnnnnnnnnnnnnnnnnnnnnnnnnnnnnnnnnnnnnnnnnnnnnnnnnnnnnnnnnnnnnnnnnnnnnnnnnnnnnnnnnnnnnnnnnnnnnnnnnnnnnnnnnnnnnnnnnnnnnnnnnnnnnnnnnnnnnnnnnnnnnnnnnnnnnnnnnnnnnnnnnnnnnnnnnnnnnnnnnnnnnnnnnnnnnnnnnnnnnnnnnnnnnnnnnnnnnnnnnnnnnnnnnnnnnnnnnnnnnnnnnnnnnnnnnnnnnnnnnnnnnnnnnnnnnnnnnnnnnnnnnnnnnnnnnnnnnnnnnnnnnnnnnnnnnnnnnnnnnnnnnnnnnnnnnnnnnnnnnnnnnnnnnnnnnnnnnnnnnnnnnnnnnnnnnnnnnnnnnnnnnnnnnnnnnnnnnnnnnnnnnnnnnnnnnnnnnnnnnnnnnnnnnnnnnnnnnnnnnnnnnnnnnnnnnnnnnnnnnnnnnnnnnnnnnnnnnnnnnnnnnnnnnnnnnnnnnnnnnnnnnnnnnnnnnnnnnnnnnnnnnnnnnnnnnnnnnnnnnnnnnnnnnnnnnnnnnnnnnnnnnnnnnnnnnnnnnnnnnnnnnnnnnnnnnnnnnnnnnnnnnnnnnnnnnnnnnnnnnnnnnnnnnnnnnnnnnnnnnnnnnnnnnnnnnnnnnnnnnnnnnnnnnnnnnnnnnnnnnnnnnnnnnnnnnnnnnnnnnnnnnnnnnnnnnnnnnnnnnnnnnnnnnnnnnnnnnnnnnnnnnnnnnnnnnnnnnnnnnnnnnnnnnnnnnnnnnnnnnnnnnnnnnnnnnnnnnnnnnnnnnnnnnnnnnnnnnnnnnnnnnnnnnnnnnnnnnnnnnnnnnnnnnnnnnnnnnnnnnnnnnnnnnnnnnnnnnnnnnnnnnnnnnnnnnnnnnnnnnnnnnnnnnnnnnnnnnnnnnnnnnnnnnnnnnnnnnnnnnnnnnnnnnnnnnnnnnnnnnnnnnnnnnnnnnnnnnnnnnnnnnnnnnnnnnnnnnnnnnnnnnnnnnnnnnnnnnnnnnnnnnnnnnnnnnnnnnnnnnnnnnnnnnnnnnnnnnnnnnnnnnnnnnnnnnnnnnnnnnnnnnnnnnnnnnnnnnnnnnnnnnnnnnnnnnnnnnnnnnnnnnnnnnnnnnnnnnnnnnnnnnnnnnnnnnnnnnnnnnnnnnnnnnnnnnnnnnnnnnnnnnnnnnnnnnnnnnnnnnnnnnnnnnnnnnnnnnnnnnnnnnnnnnnnnnnnnnnnnnnnnnnnnnnnnnnnnnnnnnnnnnnnnnnnnnnnnnnnnnnnnnnnnnnnnnnnnnnnnnnnnnnnnnnnnnnnnnnnnnnnnnnnnnnnnnnnnnnnnnnnnnnnnnnnnnnnnnnnnnnnnnnnnnnnnnnnnnnnnnnnnnnnnnnnnnnnnnnnnnnnnnnnnnnnnnnnnnnnnnnnnnnnnnnnnnnnnnnnnnnnnnnnnnnnnnnnnnnnnnnnnnnnnnnnnnnnnnnnnnnnnnnnnnnnnnnnnnnnnnnnnnnnnnnnnnnnnnnnnnnnnnnnnnnnnnnnnnnnnnnnnnnnnnnnnnnnnnnnnnnnnnnnnnnnnnnnnnnnnnnnnnnnnnnnnnnnnnnnnnnnnnnnnnnnnnnnnnnnnnnnnnnnnnnnnnnnnnnnnnnnnnnnnnnnnnnnnnnnnnnnnnnnnnnnnnnnnnnnnnnnnnnnnnnnnnnnnnnnnnnnnnnnnnnnnnnnnnnnnnnnnnnnnnnnnnnnnnnnnnnnnnnnnnnnnnnnnnnnnnnnnnnnnnnnnnnnnnnnnnnnnnnnnnnnnnnnnnnnnnnnnnnnnnnnnnnnnnnnnnnnnnnnnnnnnnnnnnnnnnnnnnnnnnnnnnnnnnnnnnnnnnnnnnnnnnnnnnnnnnnnnnnnnnnnnnnnnnnnnnnnnnnnnnnnnnnnnnnnnnnnnnnnnnnnnnnnnnnnnnnnnnnnnnnnnnnnnnnnnnnnnnnnnnnnnnnnnnnnnnnnnnnnnnnnnnnnnnnnnnnnnnnnnnnnnnnnnnnnnnnnnnnnnnnnnnnnnnnnnnnnnnnnnnnnnnnnnnnnnnnnnnnnnnnnnnnnnnnnnnnnnnnnnnnnnnnnnnnnnnnnnnnnnnnnnnnnnnnnnnnnnnnnnnnnnnnnnnnnnnnnnnnnnnnnnnnnnnnnnnnnnnnnnnnnnnnnnnnnnnnnnnnnnnnnnnnnnnnnnnnnnnnnnnnnnnnnnnnnnnnnnnnnnnnnnnnnnnnnnnnnnnnnnnnnnnnnnnnnnnnnnnnnnnnnnnnnnnnnnnnnnnnnnnnnnnnnnnnnnnnnnnnnnnnnnnnnnnnnnnnnnnnnnnnnnnnnnnnnnnnnnnnnnnnnnnnnnnnnnnnnnnnnnnnnnnnnnnnnnnnnnnnnnnnnnnnnnnnnnnnnnnnnnnnnnnnnnnnnnnnnnnnnnnnnnnnnnnnnnnnnnnnnnnnnnnnnnnnnnnnnnnnnnnnnnnnnnnnnnnnnnnnnnnnnnnnnnnnnnnnnnnnnnnnnnnnnnnnnnnnnnnnnnnnnnnnnnnnnnnnnnnnnnnnnnnnnnnnnnnnnnnnnnnnnnnnnnnnnnnnnnnnnnnnnnnnnnnnnnnnnnnnnnnnnnnnnnnnnnnnnnnnnnnnnnnnnnnnnnnnnnnnnnnnnnnnnnnnnnnnnnnnnnnnnnnnnnnnnnnnnnnnnnnnnnnnnnnnnnnnnnnnnnnnnnnnnnnnnnnnnnnnnnnnnnnnnnnnnnnnnnnnnnnnnnnnnnnnnnnnnnnnnnnnnnnnnnnnnnnnnnnnnnnnnnnnnnnnnnnnnnnnnnnnnnnnnnnnnnnnnnnnnnnnnnnnnnnnnnnnnnnnnnnnnnnnnnnnnnnnnnnnnnnnnnnnnnnnnnnnnnnnnnnnnnnnnnnnnnnnnnnnnnnnnnnnnnnnnnnnnnnnnnnnnnnnnnnnnnnnnnnnnnnnnnnnnnnnnnnnnnnnnnnnnnnnnnnnnnnnnnnnnnnnnnnnnnnnnnnnnnnnnnnnnnnnnnnnnnnnnnnnnnnnnnnnnnnnnnnnnnnnnnnnnnnnnnnnnnnnnnnnnnnnnnnnnnnnnnnnnnnnnnnnnnnnnnnnnnnnnnnnnnnnnnnnnnnnnnnnnnnnnnnnnnnnnnnnnnnnnnnnnnnnnnnnnnnnnnnnnnnnnnnnnnnnnnnnnnnnnnnnnnnnnnnnnnnnnnnnnnnnnnnnnnnnnnnnnnnnnnnnnnnnnnnnnnnnnnnnnnnnnnnnnnnnnnnnnnnnnnnnnnnnnnnnnnnnnnnnnnnnnnnnnnnnnnnnnnnnnnnnnnnnnnnnnnnnnnnnnnnnnnnnnnnnnnnnnnnnnnnnnnnnnnnnnnnnnnnnnnnnnnnnnnnnnnnnnnnnnnnnnnnnnnnnnnnnnnnnnnnnnnnnnnnnnnnnnnnnnnnnnnnnnnnnnnnnnnnnnnnnnnnnnnnnnnnnnnnnnnnnnnnnnnnnnnnnnnnnnnnnnnnnnnnnnnnnnnnnnnnnnnnnnnnnnnnnnnnnnnnnnnnnnnnnnnnnnnnnnnnnnnnnnnnnnnnnnnnnnnnnnnnnnnnnnnnnnnnnnnnnnnnnnnnnnnnnnnnnnnnnnnnnnnnnnnnnnnnnnnnnnnnnnnnnnnnnnnnnnnnnnnnnnnnnnnnnnnnnnnnnnnnnnnnnnnnnnnnnnnnnnnnnnnnnnnnnnnnnnnnnnnnnnnnnnnnnnnnnnnnnnnnnnnnnnnnnnnnnnnnnnnnnnnnnnnnnnnnnnnnnnnnnnnnnnnnnnnnnnnnnnnnnnnnnnnnnnnnnnnnnnnnnnnnnnnnnnnnnnnnnnnnnnnnnnnnnnnnnnnnnnnnnnnnnnnnnnnnnnnnnnnnnnnnnnnnnnnnnnnnnnnnnnnnnnnnnnnnnnnnnnnnnnnnnnnnnnnnnnnnnnnnnnnnnnnnnnnnnnnnnnnnnnnnnnnnnnnnnnnnnnnnnnnnnnnnnnnnnnnnnnnnnnnnnnnnnnnnnnnnnnnnnnnnnnnnnnnnnnnnnnnnnnnnnnnnnnnnnnnnnnnnnnnnnnnnnnnnnnnnnnnnnnnnnnnnnnnnnnnnnnnnnnnnnnnnnnnnnnnnnnnnnnnnnnnnnnnnnnnnnnnnnnnnnnnnnnnnnnnnnnnnnnnnnnnnnnnnnnnnnnnnnnnnnnnnnnnnnnnnnnnnnnnnnnnnnnnnnnnnnnnnnnnnnnnnnnnnnnnnnnnnnnnnnnnnnnnnnnnnnnnnnnnnnnnnnnnnnnnnnnnnnnnnnnnnnnnnnnnnnnnnnnnnnnnnnnnnnnnnnnnnnnnnnnnnnnnnnnnnnnnnnnnnnnnnnnnnnnnnnnnnnnnnnnnnnnnnnnnnnnnnnnnnnnnnnnnnnnnnnnnnnnnnnnnnnnnnnnnnnnnnnnnnnnnnnnnnnnnnnnnnnnnnnnnnnnnnnnnnnnnnnnnnnnnnnnnnnnnnnnnnnnnnnnnnnnnnnnnnnnnnnnnnnnnnnnnnnnnnnnnnnnnnnnnnnnnnnnnnnnnnnnnnnnnnnnnnnnnnnnnnnnnnnnnnnnnnnnnnnnnnnnnnnnnnnnnnnnnnnnnnnnnnnnnnnnnnnnnnnnnnnnnnnnnnnnnnnnnnnnnnnnnnnnnnnnnnnnnnnnnnnnnnnnnnnnnnnnnnnnnnnnnnnnnnnnnnnnnnnnnnnnnnnnnnnnnnnnnnnnnnnnnnnnnnnnnnnnnnnnnnnnnnnnnnnnnnnnnnnnnnnnnnnnnnnnnnnnnnnnnnnnnnnnnnnnnnnnnnnnnnnnnnnnnnnnnnnnnnnnnnnnnnnnnnnnnnnnnnnnnnnnnnnnnnnnnnnnnnnnnnnnnnnnnnnnnnnnnnnnnnnnnnnnnnnnnnnnnnnnnnnnnnnnnnnnnnnnnnnnnnnnnnnnnnnnnnnnnnnnnnnnnnnnnnnnnnnnnnnnnnnnnnnnnnnnnnnnnnnnnnnnnnnnnnnnnnnnnnnnnnnnnnnnnnnnnnnnnnnnnnnnnnnnnnnnnnnnnnnnnnnnnnnnnnnnnnnnnnnnnnnnnnnnnnnnnnnnnnnnnnnnnnnnnnnnnnnnnnnnnnnnnnnnnnnnnnnnnnnnnnnnnnnnnnnnnnnnnnnnnnnnnnnnnnnnnnnnnnnnnnnnnnnnnnnnnnnnnnnnnnnnnnnnnnnnnnnnnnnnnnnnnnnnnnnnnnnnnnnnnnnnnnnnnnnnnnnnnnnnnnnnnnnnnnnnnnnnnnnnnnnnnnnnnnnnnnnnnnnnnnnnnnnnnnnnnnnnnnnnnnnnnnnnnnnnnnnnnnnnnnnnnnnnnnnnnnnnnnnnnnnnnnnnnnnnnnnnnnnnnnnnnnnnnnnnnnnnnnnnnnnnnnnnnnnnnnnnnnnnnnnnnnnnnnnnnnnnnnnnnnnnnnnnnnnnnnnnnnnnnnnnnnnnnnnnnnnnnnnnnnnnnnnnnnnnnnnnnnnnnnnnnnnnnnnnnnnnnnnnnnnnnnnnnnnnnnnnnnnnnnnnnnnnnnnnnnnnnnnnnnnnnnnnnnnnnnnnnnnnnnnnnnnnnnnnnnnnnnnnnnnnnnnnnnnnnnnnnnnnnnnnnnnnnnnnnnnnnnnnnnnnnnnnnnnnnnnnnnnnnnnnnnnnnnnnnnnnnnnnnnnnnnnnnnnnnnnnnnnnnnnnnnnnnnnnnnnnnnnnnnnnnnnnnnnnnnnnnnnnnnnnnnnnnnnnnnnnnnnnnnnnnnnnnnnnnnnnnnnnnnnnnnnnnnnnnnnnnnnnnnnnnnnnnnnnnnnnnnnnnnnnnnnnnnnnnnnnnnnnnnnnnnnnnnnnnnnnnnnnnnnnnnnnnnnnnnnnnnnnnnnnnnnnnnnnnnnnnnnnnnnnnnnnnnnnnnnnnnnnnnnnnnnnnnnnnnnnnnnnnnnnnnnnnnnnnnnnnnnnnnnnnnnnnnnnnnnnnnnnnnnnnnnnnnnnnnnnnnnnnnnnnnnnnnnnnnnnnnnnnnnnnnnnnnnnnnnnnnnnnnnnnnnnnnnnnnnnnnnnnnnnnnnnnnnnnnnnnnnnnnnnnnnnnnnnnnnnnnnnnnnnnnnnnnnnnnnnnnnnnnnnnnnnnnnnnnnnnnnnnnnnnnnnnnnnnnnnnnnnnnnnnnnnnnnnnnnnnnnnnnnnnnnnnnnnnnnnnnnnnnnnnnnnnnnnnnnnnnnnnnnnnnnnnnnnnnnnnnnnnnnnnnnnnnnnnnnnnnnnnnnnnnnnnnnnnnnnnnnnnnnnnnnnnnnnnnnnnnnnnnnnnnnnnnnnnnnnnnnnnnnnnnnnnnnnnnnnnnnnnnnnnnnnnnnnnnnnnnnnnnnnnnnnnnnnnnnnnnnnnnnnnnnnnnnnnnnnnnnnnnnnnnnnnnnnnnnnnnnnnnnnnnnnnnnnnnnnnnnnnnnnnnnnnnnnnnnnnnnnnnnnnnnnnnnnnnnnnnnnnnnnnnnnnnnnnnnnnnnnnnnnnnnnnnnnnnnnnnnnnnnnnnnnnnnnnnnnnnnnnnnnnnnnnnnnnnnnnnnnnnnnnnnnnnnnnnnnnnnnnnnnnnnnnnnnnnnnnnnnnnnnnnnnnnnnnnnnnnnnnnnnnnnnnnnnnnnnnnnnnnnnnnnnnnnnnnnnnnnnnnnnnnnnnnnnnnnnnnnnnnnnnnnnnnnnnnnnnnnnnnnnnnnnnnnnnnnnnnnnnnnnnnnnnnnnnnnnnnnnnnnnnnnnnnnnnnnnnnnnnnnnnnnnnnnnnnnnnnnnnnnnnnnnnnnnnnnnnnnnnnnnnnnnnnnnnnnnnnnnnnnnnnnnnnnnnnnnnnnnnnnnnnnnnnnnnnnnnnnnnnnnnnnnnnnnnnnnnnnnnnnnnnnnnnnnnnnnnnnnnnnnnnnnnnnnnnnnnnnnnnnnnnnnnnnnnnnnnnnnnnnnnnnnnnnnnnnnnnnnnnnnnnnnnnnnnnnnnnnnnnnnnnnnnnnnnnnnnnnnnnnnnnnnnnnnnnnnnnnnnnnnnnnnnnnnnnnnnnnnnnnnnnnnnnnnnnnnnnnnnnnnnnnnnnnnnnnnnnnnnnnnnnnnnnnnnnnnnnnnnnnnnnnnnnnnnnnnnnnnnnnnnnnnnnnnnnnnnnnnnnnnnnnnnnnnnnnnnnnnnnnnnnnnnnnnnnnnnnnnnnnnnnnnnnnnnnnnnnnnnnnnnnnnnnnnnnnnnnnnnnnnnnnnnnnnnnnnnnnnnnnnnnnnnnnnnnnnnnnnnnnnnnnnnnnnnnnnnnnnnnnnnnnnnnnnnnnnnnnnnnnnnnnnnnnnnnnnnnnnnnnnnnnnnnnnnnnnnnnnnnnnnnnnnnnnnnnnnnnnnnnnnnnnnnnnnnnnnnnnnnnnnnnnnnnnnnnnnnnnnnnnnnnnnnnnnnnnnnnnnnnnnnnnnnnnnnnnnnnnnnnnnnnnnnnnnnnnnnnnnnnnnnnnnnnnnnnnnnnnnnnnnnnnnnnnnnnnnnnnnnnnnnnnnnnnnnnnnnnnnnnnnnnnnnnnnnnnnnnnnnnnnnnnnnnnnnnnnnnnnnnnnnnnnnnnnnnnnnnnnnnnnnnnnnnnnnnnnnnnnnnnnnnnnnnnnnnnnnnnnnnnnnnnnnnnnnnnnnnnnnnnnnnnnnnnnnnnnnnnnnnnnnnnnnnnnnnnnnnnnnnnnnnnnnnnnnnnnnnnnnnnnnnnnnnnnnnnnnnnnnnnnnnnnnnnnnnnnnnnnnnnnnnnnnnnnnnnnnnnnnnnnnnnnnnnnnnnnnnnnnnnnnnnnnnnnnnnnnnnnnnnnnnnnnnnnnnnnnnnnnnnnnnnnnnnnnnnnnnnnnnnnnnnnnnnnnnnnnnnnnnnnnnnnnnnnnnnnnnnnnnnnnnnnnnnnnnnnnnnnnnnnnnnnnnnnnnnnnnnnnnnnnnnnnnnnnnnnnnnnnnnnnnnnnnnnnnnnnnnnnnnnnnnnnnnnnnnnnnnnnnnnnnnnnnnnnnnnnnnnnnnnnnnnnnnnnnnnnnnnnnnnnnnnnnnnnnnnnnnnnnnnnnnnnnnnnnnnnnnnnnnnnnnnnnnnnnnnnnnnnnnnnnnnnnnnnnnnnnnnnnnnnnnnnnnnnnnnnnnnnnnnnnnnnnnnnnnnnnnnnnnnnnnnnnnnnnnnnnnnnnnnnnnnnnnnnnnnnnnnnnnnnnnnnnnnnnnnnnnnnnnnnnnnnnnnnnnnnnnnnnnnnnnnnnnnnnnnnnnnnnnnnnnnnnnnnnnnnnnnnnnnnnnnnnnnnnnnnnnnnnnnnnnnnnnnnnnnnnnnnnnnnnnnnnnnnnnnnnnnnnnnnnnnnnnnnnnnnnnnnnnnnnnnnnnnnnnnnnnnnnnnnnnnnnnnnnnnnnnnnnnnnnnnnnnnnnnnnnnnnnnnnnnnnnnnnnnnnnnnnnnnnnnnnnnnnnnnnnnnnnnnnnnnnnnnnnnnnnnnnnnnnnnnnnnnnnnnnnnnnnnnnnnnnnnnnnnnnnnnnnnnnnnnnnnnnnnnnnnnnnnnnnnnnnnnnnnnnnnnnnnnnnnnnnnnnnnnnnnnnnnnnnnnnnnnnnnnnnnnnnnnnnnnnnnnnnnnnnnnnnnnnnnnnnnnnnnnnnnnnnnnnnnnnnnnnnnnnnnnnnnnnnnnnnnnnnnnnnnnnnnnnnnnnnnnnnnnnnnnnnnnnnnnnnnnnnnnnnnnnnnnnnnnnnnnnnnnnnnnnnnnnnnnnnnnnnnnnnnnnnnnnnnnnnnnnnnnnnnnnnnnnnnnnnnnnnnnnnnnnnnnnnnnnnnnnnnnnnnnnnnnnnnnnnnnnnnnnnnnnnnnnnnnnnnnnnnnnnnnnnnnnnnnnnnnnnnnnnnnnnnnnnnnnnnnnnnnnnnnnnnnnnnnnnnnnnnnnnnnnnnnnnnnnnnnnnnnnnnnnnnnnnnnnnnnnnnnnnnnnnnnnnnnnnnnnnnnnnnnnnnnnnnnnnnnnnnnnnnnnnnnnnnnnnnnnnnnnnnnnnnnnnnnnnnnnnnnnnnnnnnnnnnnnnnnnnnnnnnnnnnnnnnnnnnnnnnnnnnnnnnnnnnnnnnnnnnnnnnnnnnnnnnnnnnnnnnnnnnnnnnnnnnnnnnnnnnnnnnnnnnnnnnnnnnnnnnnnnnnnnnnnnnnnnnnnnnnnnnnnnnnnnnnnnnnnnnnnnnnnnnnnnnnnnnnnnnnnnnnnnnnnnnnnnnnnnnnnnnnnnnnnnnnnnnnnnnnnnnnnnnnnnnnnnnnnnnnnnnnnnnnnnnnnnnnnnnnnnnnnnnnnnnnnnnnnnnnnnnnnnnnnnnnnnnnnnnnnnnnnnnnnnnnnnnnnnnnnnnnnnnnnnnnnnnnnnnnnnnnnnnnnnnnnnnnnnnnnnnnnnnnnnnnnnnnnnnnnnnnnnnnnnnnnnnnnnnnnnnnnnnnnnnnnnnnnnnnnnnnnnnnnnnnnnnnnnnnnnnnnnnnnnnnnnnnnnnnnnnnnnnnnnnnnnnnnnnnnnnnnnnnnnnnnnnnnnnnnnnnnnnnnnnnnnnnnnnnnnnnnnnnnnnnnnnnnnnnnnnnnnnnnnnnnnnnnnnnnnnnnnnnnnnnnnnnnnnnnnnnnnnnnnnnnnnnnnnnnnnnnnnnnnnnnnnnnnnnnnnnnnnnnnnnnnnnnnnnnnnnnnnnnnnnnnnnnnnnnnnnnnnnnnnnnnnnnnnnnnnnnnnnnnnnnnnnnnnnnnnnnnnnnnnnnnnnnnnnnnnnnnnnnnnnnnnnnnnnnnnnnnnnnnnnnnnnnnnnnnnnnnnnnnnnnnnnnnnnnnnnnnnnnnnnnnnnnnnnnnnnnnnnnnnnnnnnnnnnnnnnnnnnnnnnnnnnnnnnnnnnnnnnnnnnnnnnnnnnnnnnnnnnnnnnnnnnnnnnnnnnnnnnnnnnnnnnnnnnnnnnnnnnnnnnnnnnnnnnnnnnnnnnnnnnnnnnnnnnnnnnnnnnnnnnnnnnnnnnnnnnnnnnnnnnnnnnnnnnnnnnnnnnnnnnnnnnnnnnnnnnnnnnnnnnnnnnnnnnnnnnnnnnnnnnnnnnnnnnnnnnnnnnnnnnnnnnnnnnnnnnnnnnnnnnnnnnnnnnnnnnnnnnnnnnnnnnnnnnnnnnnnnnnnnnnnnnnnnnnnnnnnnnnnnnnnnnnnnnnnnnnnnnnnnnnnnnnnnnnnnnnnnnnnnnnnnnnnnnnnnnnnnnnnnnnnnnnnnnnnnnnnnnnnnnnnnnnnnnnnnnnnnnnnnnnnnnnnnnnnnnnnnnnnnnnnnnnnnnnnnnnnnnnnnnnnnnnnnnnnnnnnnnnnnnnnnnnnnnnnnnnnnnnnnnnnnnnnnnnnnnnnnnnnnnnnnnnnnnnnnnnnnnnnnnnnnnnnnnnnnnnnnnnnnnnnnnnnnnnnnnnnnnnnnnnnnnnnnnnnnnnnnnnnnnnnnnnnnnnnnnnnnnnnnnnnnnnnnnnnnnnnnnnnnnnnnnnnnnnnnnnnnnnnnnnnnnnnnnnnnnnnnnnnnnnnnnnnnnnnnnnnnnnnnnnnnnnnnnnnnnnnnnnnnnnnnnnnnnnnnnnnnnnnnnnnnnnnnnnnnnnnnnnnnnnnnnnnnnnnnnnnnnnnnnnnnnnnnnnnnnnnnnnnnnnnnnnnnnnnnnnnnnnnnnnnnnnnnnnnnnnnnnnnnnnnnnnnnnnnnnnnnnnnnnnnnnnnnnnnnnnnnnnnnnnnnnnnnnnnnnnnnnnnnnnnnnnnnnnnnnnnnnnnnnnnnnnnnnnnnnnnnnnnnnnnnnnnnnnnnnnnnnnnnnnnnnnnnnnnnnnnnnnnnnnnnnnnnnnnnnnnnnnnnnnnnnnnnnnnnnnnnnnnnnnnnnnnnnnnnnnnnnnnnnnnnnnnnnnnnnnnnnnnnnnnnnnnnnnnnnnnnnnnnnnnnnnnnnnnnnnnnnnnnnnnnnnnnnnnnnnnnnnnnnnnnnnnnnnnnnnnnnnnnnnnnnnnnnnnnnnnnnnnnnnnnnnnnnnnnnnnnnnnnnnnnnnnnnnnnnnnnnnnnnnnnnnnnnnnnnnnnnnnnnnnnnnnnnnnnnnnnnnnnnnnnnnnnnnnnnnnnnnnnnnnnnnnnnnnnnnnnnnnnnnnnnnnnnnnnnnnnnnnnnnnnnnnnnnnnnnnnnnnnnnnnnnnnnnnnnnnnnnnnnnnnnnnnnnnnnnnnnnnnnnnnnnnnnnnnnnnnnnnnnnnnnnnnnnnnnnnnnnnnnnnnnnnnnnnnnnnnnnnnnnnnnnnnnnnnnnnnnnnnnnnnnnnnnnnnnnnnnnnnnnnnnnnnnnnnnnnnnnnnnnnnnnnnnnnnnnnnnnnnnnnnnnnnnnnnnnnnnnnnnnnnnnnnnnnnnnnnnnnnnnnnnnnnnnnnnnnnnnnnnnnnnnnnnnnnnnnnnnnnnnnnnnnnnnnnnnnnnnnnnnnnnnnnnnnnnnnnnnnnnnnnnnnnnnnnnnnnnnnnnnnnnnnnnnnnnnnnnnnnnnnnnnnnnnnnnnnnnnnnnnnnnnnnnnnnnnnnnnnnnnnnnnnnnnnnnnnnnnnnnnnnnnnnnnnnnnnnnnnnnnnnnnnnnnnnnnnnnnnnnnnnnnnnnnnnnnnnnnnnnnnnnnnnnnnnnnnnnnnnnnnnnnnnnnnnnnnnnnnnnnnnnnnnnnnnnnnnnnnnnnnnnnnnnnnnnnnnnnnnnnnnnnnnnnnnnnnnnnnnnnnnnnnnnnnnnnnnnnnnnnnnnnnnnnnnnnnnnnnnnnnnnnnnnnnnnnnnnnnnnnnnnnnnnnnnnnnnnnnnnnnnnnnnnnnnnnnnnnnnnnnnnnnnnnnnnnnnnnnnnnnnnnnnnnnnnnnnnnnnnnnnnnnnnnnnnnnnnnnnnnnnnnnnnnnnnnnnnnnnnnnnnnnnnnnnnnnnnnnnnnnnnnnnnnnnnnnnnnnnnnnnnnnnnnnnnnnnnnnnnnnnnnnnnnnnnnnnnnnnnnnnnnnnnnnnnnnnnnnnnnnnnnnnnnnnnnnnnnnnnnnnnnnnnnnnnnnnnnnnnnnnnnnnnnnnnnnnnnnnnnnnnnnnnnnnnnnnnnnnnnnnnnnnnnnnnnnnnnnnnnnnnnnnnnnnnnnnnnnnnnnnnnnnnnnnnnnnnnnnnnnnnnnnnnnnnnnnnnnnnnnnnnnnnnnnnnnnnnnnnnnnnnnnnnnnnnnnnnnnnnnnnnnnnnnnnnnnnnnnnnnnnnnnnnnnnnnnnnnnnnnnnnnnnnnnnnnnnnnnnnnnnnnnnnnnnnnnnnnnnnnnnnnnnnnnnnnnnnnnnnnnnnnnnnnnnnnnnnnnnnnnnnnnnnnnnnnnnnnnnnnnnnnnnnnnnnnnnnnnnnnnnnnnnnnnnnnnnnnnnnnnnnnnnnnnnnnnnnnnnnnnnnnnnnnnnnnnnnnnnnnnnnnnnnnnnnnnnnnnnnnnnnnnnnnnnnnnnnnnnnnnnnnnnnnnnnnnnnnnnnnnnnnnnnnnnnnnnnnnnnnnnnnnnnnnnnnnnnnnnnnnnnnnnnnnnnnnnnnnnnnnnnnnnnnnnnnnnnnnnnnnnnnnnnnnnnnnnnnnnnnnnnnnnnnnnnnnnnnnnnnnnnnnnnnnnnnnnnnnnnnnnnnnnnnnnnnnnnnnnnnnnnnnnnnnnnnnnnnnnnnnnnnnnnnnnnnnnnnnnnnnnnnnnnnnnnnnnnnnnnnnnnnnnnnnnnnnnnnnnnnnnnnnnnnnnnnnnnnnnnnnnnnnnnnnnnnnnnnnnnnnnnnnnnnnnnnnnnnnnnnnnnnnnnnnnnnnnnnnnnnnnnnnnnnnnnnnnnnnnnnnnnnnnnnnnnnnnnnnnnnnnnnnnnnnnnnnnnnnnnnnnnnnnnnnnnnnnnnnnnnnnnnnnnnnnnnnnnnnnnnnnnnnnnnnnnnnnnnnnnnnnnnnnnnnnnnnnnnnnnnnnnnnnnnnnnnnnnnnnnnnnnnnnnnnnnnnnnnnnnnnnnnnnnnnnnnnnnnnnnnnnnnnnnnnnnnnnnnnnnnnnnnnnnnnnnnnnnnnnnnnnnnnnnnnnnnnnnnnnnnnnnnnnnnnnnnnnnnnnnnnnnnnnnnnnnnnnnnnnnnnnnnnnnnnnnnnnnnnnnnnnnnnnnnnnnnnnnnnnnnnnnnnnnnnnnnnnnnnnnnnnnnnnnnnnnnnnnnnnnnnnnnnnnnnnnnnnnnnnnnnnnnnnnnnnnnnnnnnnnnnnnnnnnnnnnnnnnnnnnnnnnnnnnnnnnnnnnnnnnnnnnnnnnnnnnnnnnnnnnnnnnnnnnnnnnnnnnnnnnnnnnnnnnnnnnnnnnnnnnnnnnnnnnnnnnnnnnnnnnnnnnnnnnnnnnnnnnnnnnnnnnnnnnnnnnnnnnnnnnnnnnnnnnnnnnnnnnnnnnnnnnnnnnnnnnnnnnnnnnnnnnnnnnnnnnnnnnnnnnnnnnnnnnnnnnnnnnnnnnnnnnnnnnnnnnnnnnnnnnnnnnnnnnnnnnnnnnnnnnnnnnnnnnnnnnnnnnnnnnnnnnnnnnnnnnnnnnnnnnnnnnnnnnnnnnnnnnnnnnnnnnnnnnnnnnnnnnnnnnnnnnnnnnnnnnnnnnnnnnnnnnnnnnnnnnnnnnnnnnnnnnnnnnnnnnnnnnnnnnnnnnnnnnnnnnnnnnnnnnnnnnnnnnnnnnnnnnnnnnnnnnnnnnnnnnnnnnnnnnnnnnnnnnnnnnnnnnnnnnnnnnnnnnnnnnnnnnnnnnnnnnnnnnnnnnnnnnnnnnnnnnnnnnnnnnnnnnnnnnnnnnnnnnnnnnnnnnnnnnnnnnnnnnnnnnnnnnnnnnnnnnnnnnnnnnnnnnnnnnnnnnnnnnnnnnnnnnnnnnnnnnnnnnnnnnnnnnnnnnnnnnnnnnnnnnnnnnnnnnnnnnnnnnnnnnnnnnnnnnnnnnnnnnnnnnnnnnnnnnnnnnnnnnnnnnnnnnnnnnnnnnnnnnnnnnnnnnnnnnnnnnnnnnnnnnnnnnnnnnnnnnnnnnnnnnnnnnnnnnnnnnnnnnnnnnnnnnnnnnnnnnnnnnnnnnnnnnnnnnnnnnnnnnnnnnnnnnnnnnnnnnnnnnnnnnnnnnnnnnnnnnnnnnnnnnnnnnnnnnnnnnnnnnnnnnnnnnnnnnnnnnnnnnnnnnnnnnnnnnnnnnnnnnnnnnnnnnnnnnnnnnnnnnnnnnnnnnnnnnnnnnnnnnnnnnnnnnnnnnnnnnnnnnnnnnnnnnnnnnnnnnnnnnnnnnnnnnnnnnnnnnnnnnnnnnnnnnnnnnnnnnnnnnnnnnnnnnnnnnnnnnnnnnnnnnnnnnnnnnnnnnnnnnnnnnnnnnnnnnnnnnnnnnnnnnnnnnnnnnnnnnnnnnnnnnnnnnnnnnnnnnnnnnnnnnnnnnnnnnnnnnnnnnnnnnnnnnnnnnnnnnnnnnnnnnnnnnnnnnnnnnnnnnnnnnnnnnnnnnnnnnnnnnnnnnnnnnnnnnnnnnnnnnnnnnnnnnnnnnnnnnnnnnnnnnnnnnnnnnnnnnnnnnnnnnnnnnnnnnnnnnnnnnnnnnnnnnnnnnnnnnnnnnnnnnnnnnnnnnnnnnnnnnnnnnnnnnnnnnnnnnnnnnnnnnnnnnnnnnnnnnnnnnnnnnnnnnnnnnnnnnnnnnnnnnnnnnnnnnnnnnnnnnnnnnnnnnnnnnnnnnnnnnnnnnnnnnnnnnnnnnnnnnnnnnnnnnnnnnnnnnnnnnnnnnnnnnnnnnnnnnnnnnnnnnnnnnnnnnnnnnnnnnnnnnnnnnnnnnnnnnnnnnnnnnnnnnnnnnnnnnnnnnnnnnnnnnnnnnnnnnnnnnnnnnnnnnnnnnnnnnnnnnnnnnnnnnnnnnnnnnnnnnnnnnnnnnnnnnnnnnnnnnnnnnnnnnnnnnnnnnnnnnnnnnnnnnnnnnnnnnnnnnnnnnnnnnnnnnnnnnnnnnnnnnnnnnnnnnnnnnnnnnnnnnnnnnnnnnnnnnnnnnnnnnnnnnnnnnnnnnnnnnnnnnnnnnnnnnnnnnnnnnnnnnnnnnnnnnnnnnnnnnnnnnnnnnnnnnnnnnnnnnnnnnnnnnnnnnnnnnnnnnnnnnnnnnnnnnnnnnnnnnnnnnnnnnnnnnnnnnnnnnnnnnnnnnnnnnnnnnnnnnnnnnnnnnnnnnnnnnnnnnnnnnnnnnnnnnnnnnnnnnnnnnnnnnnnnnnnnnnnnnnnnnnnnnnnnnnnnnnnnnnnnnnnnnnnnnnnnnnnnnnnnnnnnnnnnnnnnnnnnnnnnnnnnnnnnnnnnnnnnnnnnnnnnnnnnnnnnnnnnnnnnnnnnnnnnnnnnnnnnnnnnnnnnnnnnnnnnnnnnnnnnnnnnnnnnnnnnnnnnnnnnnnnnnnnnnnnnnnnnnnnnnnnnnnnnnnnnnnnnnnnnnnnnnnnnnnnnnnnnnnnnnnnnnnnnnnnnnnnnnnnnnnnnnnnnnnnnnnnnnnnnnnnnnnnnnnnnnnnnnnnnnnnnnnnnnnnnnnnnnnnnnnnnnnnnnnnnnnnnnnnnnnnnnnnnnnnnnnnnnnnnnnnnnnnnnnnnnnnnnnnnnnnnnnnnnnnnnnnnnnnnnnnnnnnnnnnnnnnnnnnnnnnnnnnnnnnnnnnnnnnnnnnnnnnnnnnnnnnnnnnnnnnnnnnnnnnnnnnnnnnnnnnnnnnnnnnnnnnnnnnnnnnnnnnnnnnnnnnnnnnnnnnnnnnnnnnnnnnnnnnnnnnnnnnnnnnnnnnnnnnnnnnnnnnnnnnnnnnnnnnnnnnnnnnnnnnnnnnnnnnnnnnnnnnnnnnnnnnnnnnnnnnnnnnnnnnnnnnnnnnnnnnnnnnnnnnnnnnnnnnnnnnnnnnnnnnnnnnnnnnnnnnnnnnnnnnnnnnnnnnnnnnnnnnnnnnnnnnnnnnnnnnnnnnnnnnnnnnnnnnnnnnnnnnnnnnnnnnnnnnnnnnnnnnnnnnnnnnnnnnnnnnnnnnnnnnnnnnnnnnnnnnnnnnnnnnnnnnnnnnnnnnnnnnnnnnnnnnnnnnnnnnnnnnnnnnnnnnnnnnnnnnnnnnnnnnnnnnnnnnnnnnnnnnnnnnnnnnnnnnnnnnnnnnnnnnnnnnnnnnnnnnnnnnnnnnnnnnnnnnnnnnnnnnnnnnnnnnnnnnnnnnnnnnnnnnnnnnnnnnnnnnnnnnnnnnnnnnnnnnnnnnnnnnnnnnnnnnnnnnnnnnnnnnnnnnnnnnnnnnnnnnnnnnnnnnnnnnnnnnnnnnnnnnnnnnnnnnnnnnnnnnnnnnnnnnnnnnnnnnnnnnnnnnnnnnnnnnnnnnnnnnnnnnnnnnnnnnnnnnnnnnnnnnnnnnnnnnnnnnnnnnnnnnnnnnnnnnnnnnnnnnnnnnnnnnnnnnnnnnnnnnnnnnnnnnnnnnnnnnnnnnnnnnnnnnnnnnnnnnnnnnnnnnnnnnnnnnnnnnnnnnnnnnnnnnnnnnnnnnnnnnnnnnnnnnnnnnnnnnnnnnnnnnnnnnnnnnnnnnnnnnnnnnnnnnnnnnnnnnnnnnnnnnnnnnnnnnnnnnnnnnnnnnnnnnnnnnnnnnnnnnnnnnnnnnnnnnnnnnnnnnnnnnnnnnnnnnnnnnnnnnnnnnnnnnnnnnnnnnnnnnnnnnnnnnnnnnnnnnnnnnnnnnnnnnnnnnnnnnnnnnnnnnnnnnnnnnnnnnnnnnnnnnnnnnnnnnnnnnnnnnnnnnnnnnnnnnnnnnnnnnnnnnnnnnnnnnnnnnnnnnnnnnnnnnnnnnnnnnnnnnnnnnnnnnnnnnnnnnnnnnnnnnnnnnnnnnnnnnnnnnnnnnnnnnnnnnnnnnnnnnnnnnnnnnnnnnnnnnnnnnnnnnnnnnnnnnnnnnnnnnnnnnnnnnnnnnnnnnnnnnnnnnnnnnnnnnnnnnnnnnnnnnnnnnnnnnnnnnnnnnnnnnnnnnnnnnnnnnnnnnnnnnnnnnnnnnnnnnnnnnnnnnnnnnnnnnnnnnnnnnnnnnnnnnnnnnnnnnnnnnnnnnnnnnnnnnnnnnnnnnnnnnnnnnnnnnnnnnnnnnnnnnnnnnnnnnnnnnnnnnnnnnnnnnnnnnnnnnnnnnnnnnnnnnnnnnnnnnnnnnnnnnnnnnnnnnnnnnnnnnnnnnnnnnnnnnnnnnnnnnnnnnnnnnnnnnnnnnnnnnnnnnnnnnnnnnnnnnnnnnnnnnnnnnnnnnnnnnnnnnnnnnnnnnnnnnnnnnnnnnnnnnnnnnnnnnnnnnnnnnnnnnnnnnnnnnnnnnnnnnnnnnnnnnnnnnnnnnnnnnnnnnnnnnnnnnnnnnnnnnnnnnnnnnnnnnnnnnnnnnnnnnnnnnnnnnnnnnnnnnnnnnnnnnnnnnnnnnnnnnnnnnnnnnnnnnnnnnnnnnnnnnnnnnnnnnnnnnnnnnnnnnnnnnnnnnnnnnnnnnnnnnnnnnnnnnnnnnnnnnnnnnnnnnnnnnnnnnnnnnnnnnnnnnnnnnnnnnnnnnnnnnnnnnnnnnnnnnnnnnnnnnnnnnnnnnnnnnnnnnnnnnnnnnnnnnnnnnnnnnnnnnnnnnnnnnnnnnnnnnnnnnnnnnnnnnnnnnnnnnnnnnnnnnnnnnnnnnnnnnnnnnnnnnnnnnnnnnnnnnnnnnnnnnnnnnnnnnnnnnnnnnnnnnnnnnnnnnnnnnnnnnnnnnnnnnnnnnnnnnnnnnnnnnnnnnnnnnnnnnnnnnnnnnnnnnnnnnnnnnnnnnnnnnnnnnnnnnnnnnnnnnnnnnnnnnnnnnnnnnnnnnnnnnnnnnnnnnnnnnnnnnnnnnnnnnnnnnnnnnnnnnnnnnnnnnnnnnnnnnnnnnnnnnnnnnnnnnnnnnnnnnnnnnnnnnnnnnnnnnnnnnnnnnnnnnnnnnnnnnnnnnnnnnnnnnnnnnnnnnnnnnnnnnnnnnnnnnnnnnnnnnnnnnnnnnnnnnnnnnnnnnnnnnnnnnnnnnnnnnnnnnnnnnnnnnnnnnnnnnnnnnnnnnnnnnnnnnnnnnnnnnnnnnnnnnnnnnnnnnnnnnnnnnnnnnnnnnnnnnnnnnnnnnnnnnnnnnnnnnnnnnnnnnnnnnnnnnnnnnnntctttttgtctgacaaaaagacactgactccctgggacttagcatataatagatgtttgctggctggctggctggctggatgaatgaatgaatgaatggaaggcagttgattcagaaatgcctattactacctcaatttagttccacagacattttcctgagtccctaataataattatcagctgcaagctgacaatataggctaaatcagaggtgccttggccccaaagcctacatgatgggggattcaggggacctgagacagatgcccaaaggacaattaggtcacaaggattgaagggaatagaaggggctggagtgctcagaggagaggcattgtagtagacatctgttgctttttcagctccccacaatccagcccccatttcatttgggggatcatcccgagacagagactgctaattgtcccccaatacttattgtccccttctatagtaatagaattcctctaactgagtacataactgcccagaataatgaccacatttcccaggcatcgtgcacccaacatgctgtagattaagttctcagcagtgagatgttagcagaagtaatttttgcaatttctcggtcatgcacttcagaagaaatgtgcctcgcccctttccctctcccctggtaggaatgaagtcatggtgtgaagccagtttatatcaatcagatgaagctaaaaccctaaggatgtcagagtgacaaaagagaaggagcctgtgtcccaacacactgtggttgcctatcagccctggactagctctaactaggttttccatgaaagagaaattaacctccagtctatttcagtcactatttggggtgagtgctctcttgcagaaggaaagcctgtatactaattattagtgctgtatactaattattagtaaaggctgtatactaattattaccaagaagggctgtgttgctggtaacaaaactgaaaacatattttaaatgctatacataaatatgatgatctggaaaccctgtttatgccatgccatagcagtcgatcaactgattcctgcaataccttgcaaagtcagctcttgctctaaaggaaacagttggaaatttcagaatgcaggtgtttgctggatgcttcttgccactctcaacagagtcctacatgacccagaagaacgtggacagagctagcccgaggaaggcagatactgaagagaatacagcagtgctgaaagaagctccctttgcctatgggctataacctcagtttaaaaagttttcagacctaaaaaaaaaaactattgcttgttaaaaactccatatttgatagcttgattcttatatcttgaaagatttttaaagtagtgtaaatataactgatgttatgaaattctgtttcatgttctgtagagcagttatatatcataatgtaggcagaaatcagccatcatatcatatcatatcatatcatatcatatcatatcataatgtaggcagaaatccgccatcatataattgtgagcagaaatcagccatcatataattgtgagcagaaaaatacctaattggattctgtaaatgggtatattttgaattatgctgtacagtgcttgcccaaaaaaatactgtgcctgaaaatggcatcaatttattcataaaaaatatgatttaagtgattttctaacaacatttcaaaggcgcctttatggttctcaaagtgttgccatataataatattcctttagaataaaattatatttatttaaaaaaataaagagaaaaatctattgcttctgtaccacaaactgaggcagatatagaataattttctgaagaagcaggattagcaggagacaagactatggaccctagtctttctcaaacacttgattacgtttctcaacctgacaatgacagccgctcggccacaaagaccagatcaaggaagctgccttccagtccaagttgagtgttttcgctggtctcaggttgagagggaggtgaatagatataacatacaggctgataaataaaaggccaccatttttaggcttaaatactgctaatctaaaggaggttgagcatcactaaaccaaaaacccagaaatccaaaatgctctaaaatccaaaacttcttgagcacacatgatgctcattggagcatttcagattttggattttcagattagggatgttcagccaggataatgcaaatattccaaaatctgaaatatgaaacactctggccccgagcatttcagataagggatacccaacctgtacttgccccagaggataactagccacaaataggcagaaagccaattgagattttaaggggcatgtgttaccaaagaaccatgagtcgggctggtacaagtctgcatttttgactccttaaatcaaccgacccctacccaccaaacctgcacctgcaaaaagtgggctgcaaaagctatgcagcccaggcccagtgtggtggcatgtgcctgtagtccctgctgctctgaaggctgaagtgggaggatttcctgagccccaggcacacgagtccagcctgggcagcacagcaagaccttctctctaaaaaaaaatgtttaagctgtatagccctaagagggatacatcgtttgatgccctttagttgtgccatggaaggcagtggacaaagaggggaccaccaaggtccaaagatgtctatcccagggaatactcctggagagaggcgctgtcatccaaggactctgctccactccctgggaaccttcacaatttctgcccaccaggatttggtgggtgtgtttttccctcttctggatgaggtttcccaccatgtttatcttatttttactggctgttgcatattgggtgtaaggaggcaggcaatgtatgtaagggttccagggcaatacaccataaagaactgcatccagaagcctggtgtggtggctcacacctgtaaacccagcacttcgggaggccaagatgggaggattgcttgagcccgggagttcgagaccagcctgggcaacatagtgagaacttgtctaaaaaaacaaaaataaaacaaaaaccacatcagatctgatggtgcaggctgtccctccacaggtcccaggcttggagctggacataggcactggatgcaactttagggttgtctcccctggggaggggacacatggaaatttgactggccaatgggacaggctggggctgagattgctaattgcccccgatcacactcatctcctatgtttaaagaattcttgtttttttatctggagatacggaaatccagaaaaaaatactgtatttcctcacttcctagaagctatatttggccaagtaactgaccagcagcattgaagtagggagaggtgacacttttaaccagaggggcgagccttcctcttccgccttttccgtttccactggctaggcagtggaggtgatggtgaaacatctcacatcacaatacctagggatagagaagcaacaagatggggaaaaaaaaacctgggctcccaggctgcttacctgcaggcaggtgagggagaaagaaacttctatcttgcttaagccaatcttatttgaagtctctcttccagcagttcaacatatattccacaaatatattactcacactctacctcctctacgctcatgtgggtcttagaagaggggtgtatgctaggcctcagccaatcactgtatcagtttcctggccagagattgttcaggataagtgtgtaccccacttagatccaatgataaatactttatctgggaatctggagaaagaaactcactctattccccaagggaatgtggcgatgaagccaccatcttacatgaagccggatactggagccgcccagagaaggacaaagtgaggatgtgcagaagcaagttcccgagaacatcccgggagccttgacctcagtgaggactaaggctagtctcatcccttgacatctcaattaaggaagacaatacatttccttttttaaaaaccaatttgcattatatttccatcctttgctaccaaaagtgtccttagtgatacgctggtcaccgtgggagggttacagaggcaacatggaagggggatgtctgctttggtctcagaccacctgcaacttgtttgggggaaaaaatgggtttgttataaggatgcatgaggatttgaaccagaattgaaaagtcctcaggaataggcgagacaacttcagaaatagccattgctccctctcttcatggagcttcccagaccggtttcctcctgactgtgctctgccagctctttccaccaactggcgccctctcctgatgctgaatttctgctgctttgaaactgagttgccaccatgccagctcctcctagtggcacgtcttcacatatccttcatgcttcttcccttgcagctggctgtcttgctcctgccctgtttctcaacttccaatttaaaaaagagaaattggatagacatagatcatctttaatgccagaggaaaactcacaaatcctgaccagcctgattcagagcctgagtcaggtgtttgcttgctcttgtccaactgttacatgatctaaaatagggccacctgctggctgtctcctcctctagggctgcgggcatggcaggtaccaccactgatgtgtcttgtatgcctacacagaattattgtattaggcaatactcttctgacttcaagaggcagaaacccaactcaaattggcttaagcaccaaagggacttttcactgtttcttgtaagtcaacagtccagggtaaccgggcttggccagagcccctagcttaaatgatgtcatcagaactggcacctctctcttttagccaggctctccctacatagtgggtcttgggaactcctggattatgtttatgtcctcacagctctaagtccatggacaagagtttaaggaacaaggacagtgccaagttaactgtactagccattactgttttgttttgttttgttttgtttttgagactgaggctctctctgttgcccaggctggagtgcagtggcgcaatctcggctcactgcaacctctgcctcccaggttcaagtgattctcctgcctcagcctcctgagtagctgggattacaggcccccaccatcacgcctggctgatttttgtatttttagtagagacagggtttcaccatgttggccaggctggtctcaaactcttgacctcaaaagatctgcccacctcggcctcccaaactgctgggattacaggtgtgagcccggctgccattactgttattatggctcccaaaagttgcccacaaattccaggttcaagtcatagtaaactaaggtaggccactgcccagctcctaaccactcactgaggcctgcagcatgtgatgctctgactggccaggtctggatcaaatctagctctggagttaaaagagaaatgggaccactgaattttgtcaccagaagcagcaagaatagatgctgagcaggcaaaaacaacaaatgtcctctgcaatctgcagcattggttgttgaatgttacacatacccctcttgacataaacacagctgttaaaatattctttctcaagataaggcagttataccatataccaccaaaaccctactcactcccactgcaacagaagacagcgcagaactcaggttctcaaccagttgctgcattcaggttcagaacccctggaggatgtgctgtcctctccgaactgtggtaagtgaagctctgaggacatagatagcaggacccaacgggcctcttccatgtgcctccaccggggtgagtaaattccaatcagtccccaatgagtctggcttatttcactcaagattcaagtttcagaatgaaagcatctgactggcccagtttgcatcatgcacccacccactgaccaggggagtgcagagcacagtgcatctgttggaggcgggaacatggtttctgttactatgagcgagaagtaaggatgctgggctaacgtgggaaatcctcgctgagtggatttctctgcctcgataatgacatggacactgctgatgagctagctggtgggtgtggctgggtcaccaggctcatatgtggcagccaggcagctccagataggagggggtccccaatgtctgggagctgtggactcccaattcttgtcttgaggcccactggcacagtcctcactttggagaaattggggcactgtttatgccagttcaggcttaggccctggctcctccctggtctgatcatgaccttgcttgaggactatgtgtggacactgctgattgccgacctgtgtcaggatagtctgggttatgttgcaatagcgacctcacaaaaatagcagtggattaactaaacacaagtctatttcccacccttgctctatgcctatcacaggtttggcaagagggctctgttcatcgtggaggactcttggcatttgcttttacagtcatcacatcaatggaaaagaacttggggaacaatgtaccaactgtctttttttaaacttttatttcagaatcagagggtacatgtgcaggttgttacaaaagtatattttgaggctgaggtttggaggagaaatgaatccatcactcaagaggagcatagtacacaataggcagtttttaatcgactcttgacccccctccctccctctcttctcttgtattccccagtgtctgttgttcccatttttatgaccatgtgtacccaatgtttagctctcatttaacaagtgagaacatgcagtatatagttttctgttcctatgttaagtcacttaggataatggtttctagctgcatccatattgctgcaaaggacaggtcttccttctttttgtggctgtgtagtagtccatgatgtatatgcacaacattctttctatccaacccactattgatgggcacctgggttgattccatgtctttgctaccatgaatagcgcagtgatgaacatatgggtgcatgtgtctttttatgcaccaacttttaaagcttccactagaaagtgatacatctcacttctgctcccatttcattgatcaaagtaagttacacatccttaactaaccccaagggttgtaccatctgcctagaagaaagaaaaccaaatatagtggccaaatacccacttcactaatgacaaccactacccaatttctctctcctcttcttccaaaacagagcaccagttttgactgggatgacaattgtctagctaaatatatttacttttccttgtaacttccttgtatctggggttagttacacgtgaccttgttctaaccaatgagatgtaagagggaatcactaggtaggggtttcttggaaacctagatgtgatgccttgagacgcagcagccatactgtgaacttaaggacagaaaccacacactccagaaggtgaaggaggatgatgagggagcctgggatcttgatgaaacccttaagcatctgtgccaccctgggctgctgatctctggggtgctggctacataacaacaataaacccctatctgatccactgatggtcaggtgttctggtatttcatccaaacacgttccttactatttacctgctctgtatttgaggtttctcagtcttcggtctttcatgtacagatgatttatggtgcaatgggaagaactttgaatcattcgacactggattcaaatctggggttgaccgatttctagttgtgtgaccttgggcgagttgcctaacctcttccagctttagttttctcatctgtaaaattggaattgaaatcccgtggcattgacagccatttcttatgtcctcttccttcaaccagtctcccattataggactgaaaaggtcagatacacactttcttggtctccttgaaaccagcatggctgtgtgtgggtctggccagtgagcaacaaggtatggagggtcagtgtgctggaggctttctgataagatgagggatgtgagtgaggaaataaacactttccctatcagattcctttccttcttttcctgcctttgaacttggtgttagaagacaccaagccatctcgaaacttgaaggtggcagagcaggtgacacatccaaggaatctggatcttagatgatgatgttgagctgccaagtcaaatctgaggctacccaaccacaaatgtcttgctaagtaacaccatttctccccattccaaggaaggcctttttttttcacattctgacaccactgtcacttctcatatctgatttgatagtaaagaatggcttcatggtttggcagcaagttttgcttatacaaagaaagtggtgcaaaacagtggtgcatttcacaatcaatgacatcttagagctaatgaaatacgaaagcaaatcttcttatggtgtaagccctatttaggcttatttagtcagatttagtcagatttactgtaaattgtaaccaaaagatttcctaagtgataaaagtacctgccataggccaggcatggtggcttatgcctgtaatcccagcacttgggaggccgaggcaggcagatcacctgaggtcaggagttcaagatcagcctggccaacatggtaaaaccacatctctactaaaaatacaaaaattagccaggcatggtggtgggcacctgtaatcgcagctactcaggaggctgaggcaagaaaatctcttgaacctgggaggcagaggttgcagtgagctgagatcgtgccattgcactccagcccgggcaacaagagcgaaactccatctaacaacaacaacaacaacaaaaaaaacctgccatagatggtggttgtaaagaataaataattttttaaaaagaatgaatgaataaaacaatgtaagtaaagtatttggtgtagattatttatttggtcagcatttcaaaatccttatataaattattttgttctactatgtccaaatgtaaacacacatgtgtgtgtgcaaacccaagaaaggtgtatgtccctaaaataaggccaggtacaaatttgggccacagacggcccaaagcaggtgggcaatcttgtatcattgaagacttgtgattgcaaatggcagatacctactcaagctggcattaagtacacatcggaatttgtgggctcacctaagtgaaaaaccaggtggtgttctagcttcatgccttgtctcattcacccatcaccagcatccagtatctctctccctctctttctctgggtacgacctattcagctgaccctgtcctcagaccagcttttttctcatcatttgagattctctcattaaattcaagaccctcgggaagaacccttgcctctgtccagcattgtcagaaaaatcagccttgcagctcattggctctgtgtttccctgaaccaatctctgcagccaggaggagggacctgtggaggaatcaagcccagctggaagaagaagagggtggagtcaaccacacccaagaggagggaagggctttcccagagggcacttttgactggggcaccactgcaacaaaagaaggataaagtatgctgtgtgaaaacctcagatgtcccccacaagccttctctctttcccctaaacccactaccccttagcactttattcctcccacagcagcagaggctggtccagagaagaccaaggccagccagtaaggaaaagtgacaagatcatccaccttcagccacaactttgaggcacgtggagaggggacaaggggtgtggccctgccagctcacagctctagtctcaccaaaggaatcaaaagagagtgacagtgttttgctcagcttttgctgcttacagagtctctatggcatcatccagaagcatttatttttcccttccatgtctgtgggttggctggggtctgctggctcaggctgaactccttgatctcaggctccaggtggggtttggacctgcaccacagagcactcattggcctggagccagctctccctgggccatgctcatctcaccgccttggctaaagcacaggagagcaaggccagccgcacggtgcagttccagcctctgccgcatcatctctgccaactttccagtggcccaagcaggtcatgtggccatgctcaaagtcaaatcatggggaagcatgtgtcccactgatatggtttggaagttttttcccctccaaatctcatgttgaaatgtggcttccaatgttgcaggtggggcctggtgggaggtatttggatcatgggagcagatccctcatgaatggcttggtgcctccttttagtaatgagtgagttattgctctgagttcaggcaagatctggtagtttaaaaaagtgggcatccctttttcttgttccctttcttgccacttgacacacttgctccccttccaccttctgccatgagtagaagcttcctgaggcctcaccagaagcagatgctggcaccatgcttcctttacagcctgcagaactgtaagccaattaaacctcttttctttataaattacccagtctcaggaattcctttataagcaatataaacagtctaatgcacccaccatgttgcaaggctgtgggagtacaataccggtacagggaagagagaacttgagaccaatcatttaattgaccacagaaggtaaccaaagaacagccttcccacaggctcagcacttttaactgatttttttatggaagtgaaacctcagccttgagcactaaagcccagtaaaatggtctcgttcaagatcttgggatctatttgagggaacaaaggaggacatgtgagagccccgagctccctatggaggccacacttggaaggagcaggtattcagcagagatcattcccttctagccactgtccccgcagtcccaagacagtcatcagaaaggccacctaggtaataatcaaatctgcaaacttgagttaagtctccccatctcccatggtgagggccagccacagacagcctctgcccttggagagggtgccatggtcagcctcctctctcctctctcactgcccgtagcagacttctgaggtaagagcatgagcagaggaaaggaaggggatttggaaagttctgtcttgatggtctcgtaagatgccttacctctccagatctggaagaggtttcatgctcaaatgggccctttgaaaggaaccctcgatccttcacccctgacacccactccagaaccagagtgcccttgacctgagcaaatgaatcagaagccacttgctccctcctctacccctagaaagttcacctcctacttccttccactgtgctacatatgccctctgggtagggcctgtggtcaggactgagatgatcacacaccggctctttcattcacatggccaatgtctggttgtgggaaatatgtacacattccacatcctgacaagtccccaggcacatgtcagtgacaattccccatcacactctgagccacactcgcactaccagtggcgtgtcatgtgcccaagatccacaaacctttggctggcatctgagggagcccggctgcttcccaacacagcagctgcctactctcttcatcagaaccaagaagccacaattgcctgtgcacctccaccagcagtccgtctgcctcccaaactccaggggacagaaagcaagctctcagagcagagttgaatcccccactctctgggctggagggcaggctgtcctctgctccacctgccccctctctacctcagcacagccccctccccgagcacacccccctccccagccctggccagccgtaggaggtgggagtccacatcacagccccagccctcaagaaaggaatctggcaaatcccctccctccctcactctctcagcccttcctctcactgggggacagttgtccagcaggttctcagccacctttggaaatctgcgtcttagtctgtcaccactctttggagtttgatagctaatttcttcatgtcttaaccgacacatcaatttagcatattaatacatcaaaaaacaaagtctttctgccctcttatggctcattggatgcatgcctggtgactgagcacattgctgttcctgaaaaaaaaaatgtgggtcagttgttagcacagaagctggaggaggggcaggagtgagccatggaggctgagcagtaaattaattgttgtttgccacaaatggcccttgctgaaaagatcccatccctaaggggggtcaaaaaactttaggacagctgagtgcccagaggtgacgattgaggaaggacaagccttgcctcagttcctgacttctgctccatgctgaggggcagccttggtggtcaagagactgaagctggaacagctgatgccaacgccggctcagctccttgctaacacagtggccttggcgggctcactcccctctgccgccctctctctccacccctccaggggcaggggctgcatgcagcaggatgcaggggctgccaggacaacataggtccccacctcagcacctgtgctggctccatcctctctggctcctccacgtggggctttccatggccccagacttagctccttctgctcaacaactcctgccagaaaggaggtgtctcttccccagtacatcccataaaattccagtgttgatcctgattagcctctcacgggggcagggggtggcgtcacagggacatccctgaacctatcactgcagccagaaatgaactaggctgagcagccaggcctgggtcatggacaaagcgctagaataggggtgagtaggggagtgccaggtactgtgtggacagggaaggggaaggaagttgttccctccagagggaaggcagagttctggtgctggttgagaggaggcaggggagcaggcctgccaggcaggggagcagcagggcaggaagcagaaaccacgcccaggggcaggagggagccacaggcccaagcccaccctgccagtcggagtgactgtctgcaggaggagacacaatttggagccagcatgtttcagtgggggacgagaagttctgatccaacaaggaaagatactccctccaagctcctcaaaagaaggggctggaggaaattaagtctgaggccgccatagcagaaccaaagagcagacaggatgctggcaggggaaccctccccctcctcacaaagaaggacctgggctgacctggtgcaatttgcatgaattgagaaacacagtcttccacatgcttctcagcgtggcctttatcctgctatggcctctgtgttcctcagtgatgagagatgacacttccttagacagggatgattcttaaggttaattgaaagtggcctttctcgtaatcatctgctgcaatgaattattaatcacctgcaggcatttgcaggtctttaaactcttggacttcctgcagccctccttggaagtgcttttgccatggaaatacaacttccgcttggccatgaaagacagaacccatgtctgctgctgtttccaggcttcccagctccacagacacggggaagaacaaggtctgaaaacaggaagcagagccagagctgctgccagaccctggatgcctttctgttctggggagctggctccaggccagccaggtctcagagcccccgggcagtggatggaggggaggctgcccaaagtgcctgtggctctttgcctgattcacggtcagcgccacaggagagggtctcctgggtccttgccctacagctgctcactggtgaagaaggaacgagggagccaggtgccaggcctagatccaccacttagtgggtgggccaggaaacctctttgattcagtttcctcatctgaggaggaggtcatgaccctgcagggcagacatgaggcagggctccatgggatcgtgtacatcaggcctgcatctcaatgctcagaacatcaggagcagcaagaaggatgagctccctcctgccacctgcttttatcttcccgtggaggaagattgactcaaaactcagtgggctggctggcagtgtaaggattttgcagatagagctgacaacgtgattttgcagaccccagaagctggtctgcaggaccagggcagggagctcctgttgggccctaaattgtgagcccaggatgtgtatgatgcatggacaatgtgggcagaagctggggcagctcatcccaatggcaagagcccttcatctgccattcagcacagcctcagccctggaggtggatagtggcgatgccaagctgaataagacacggccccctgccttcatggaggccctcggctgccaggaagagtgaggcagcagtctcaggcacagagtcccatattcggcatggtagctgcaaggaccatgaggacgaggggatgatgaagggtttcacagaaggcaagatgctgggggttcatcttgaaacatgagcagtggagaaggagggtgggaggggcattgagtatttcagacagggagagagcagcatggtgggagagcccagtgcatacgcagagccgtggaagtagctgcatcagtctgggcacaagcactgcagagagatgggtggtgggggggatgagaatgggaggggagcctggaagacaacagctgggaaggggagtgggtgcagcatggaatctgaagagctgagaggaggcccatgcagagctccagatgagaggtgatggagggctgggcaaggttttttgccatgatagagatggacagaggaggaacagctgtcaggacttggtgacacagagaaagatggggactttggaaaagcacagcatgggggtcgagagatggcagctctgggcctggcactcaggaagtgccagaagggattcccttttcaaaaaacatcccactacccaactccacccccagaacagcctgagtacagctcgggcgcaatcatggaggcagctggtgtggatgccatgccccactggggtggtcaggtgggggtgcatggcagctgggggaaggggtcaagatagctgacgggttccatgtaggggtcccctgagccttgctagctgcctgagtccagtgttgaggcacactgaactctagacagaggaaggggaaatgtaagccacccctcccagggtactgcatggacaacatggtccacacaatggtcctagagatatcaagtcctcatccccaaccccgtgactacatagcaaaaggggctttgcaggtgtgattaagttaatgatcttgagatgggggtggtggttatcctggattatctgatgagcctcttatagagaaacgccacactctgagatgaattcagaagtcctttattagccggcaaccgagagatggctagtgctcaaaattctctcggccctgaagaaagggctagattttcttttatactttggtttagaaaggggaggaggagcctagctgaagcactcttacagaagcaaaacaggcaaaaagttaaaagacaaatggttacaggaaaacaaacagttccaggtgcaggggttttaaatccatcacaaggcgatagatgcgggggctttgggtaccatcaaccggacacaaatgtgggggcttagggtactatcaactgggcaaattcctgggaactgcggatatagcttgccacagtatcttatccattaattgcattctttgatgtgctgggagtcagcttgcacaagttaagtccttgaggaaggggggtgggtaaggggctgcaagtgaaggagccaaaatggagtgtgtctggctctctcagctaagggacagtcaattcaggttaaaacaaggtagggtatcacacttacaagagggaggcagaaagagttgatgtgaaatgacctggagtgggagaggttagaaaaggctgtgctgccggctttgaagacaaaggaaagggccactagctagcagcctctaggagctggaaacgctgggaaacagctcccttgcctccagaaggcacaggccctgccaacccagtttagattcccgaccccccgaactgtgagataacatgcgtgtggcttaaactactcaatctgtggtactttgttgcaggggcaacaacaaacatacagacatctaactcagacccgaggccttgggtgggacccaggccccatttcctgagacacctgctcccacagcgacctggggtaagcagaagtgggggaggattctccagacaccccagactgtctccaagtagagcggagatctcgccagttaagcgcacagctgaggacagttactgggtgaagtggcctgggtctccgccttctcatgcccccaccgcccagaccctagaaggggagtggctgcggcctctgcaccctggccctgagggctcccagacccggcccagtggggcaccccagttcaccaccctcctcgccttaggtgagccaaagcccaggcagggtggagcctcacgcacactgactggcccctaggacaggcacaggtgacgcgggggtgtgggacccaggctatgactctggacataaccttcaaggctgtaaaacgagaaggtccatccccccaaaacacgcactcccccacaaccaccccctcccccccccacacacacactcccctgcaccacagatacacacattcctttcgctccccactcagacgcctcgaggcctcggcgggggaaccataggggcgcgaccagggcgcgccgaggggtgaccagagaggacacgcagcgaccttactcccgcctttcccgcaaggcgcgttcgccagcctggactagtgggcacgggccctgcgttctaataatcaccataataataggcgctgggtgtacagaggggacccaggcgacgctggcctccatccgataaccaccgtaacaggggctgggccgcgccgctcctccgctctaagtgttctttacatgcttcttaagttaccggcaggccagccgcccttacgagagcccctcacggacattaacccaattgagaagactgaacccagcatacgaacgttaagttgtcccaaatcgcagggctggcgagtgaggagcctgaattggaacccaggagcttctggaacccgctccagaattgcgctctcgaccggtttgtccgctgagagcgaacgggtgcgcgagcgccgcatccctgcccaaggccatcaggcaggcagcgctggggcccgggacccgcgcggagactccaccccgggatccgggaaggctcccccgagccggggtcggagctgcggctggaggggcctcggcttgaggaggatctgggagggcgggggctcagtcctggccaccaggtgtgaggggtcgggtgcggagccctgtgtcagacgcggcggtgaaggctgtagccctgctctccgggatgggggtggtactctcaccgcaccctgccccaagccgcagggagcccctggcgcccctggcgcccgggacccgccctggctggagccctgcggtttccgggagctcacggtcggctctgcgcccctccaccgccgggcctgggcctgggccagggactggctggggcgggactgcggcctcggggcgctgggtccctgcccctgccgtgcactgcgcggctccccgcgccgcagctgggcaccagcagcaccacggaccgcccctgtgctcgcccgacggcgccccgcggcgctttaagagacggcctggcagcccagccccagccgcccagaccggcgagaccagcctgcgggagcagccccatggcgggtaagcgagcctcgcctccccagcccagccccggcccctctgcgacccttccagcacttgcctccgccccgccgcccccgctggggtgcagcgcctgccctgcccggcctcggcgcgctcttggaggggcactgggatggagtagacgctgaggcccgctcttcgcggtcagttgcggcttaggaggtgtggggggtccggccttctcaccaccccacccagtgcagatccctgagacctgaatgccccgcggccgcacgtcaccctaagggaggcacctttttggcccgccccaggtggccagcggttggaacccagcgtctgagcacccccggggcgaagcctcctaggtcccgcaaatgcggacgtgtgagggccagcagcaatggggccttgccccctcttcctccccacctcgtccaccgcgtcgcaccaactcccctaagcgcgtgctcaccttgatagagggctaggggagggagcgggtgttagagaagagtccagccttgcagcaggttccagggccccagagggtagaggtttgattgcagaccagggggaaggtacctttcagggctttccttaactgactgcgtccacaccccagctcccctcctggcctcaacaggagcccaggggatatggaggttctggtgagggcaggtttgatttctactcagaagcgcaaggaaatggcttctttaagccagaatcccaagggcagggccagctgttttccaaggaaaactagaaggttctgcccagggctctcagaccctggggtaaacggcttctcctctgagagctggcggaacctagccagcagcatccctcccggaacccatccccagcaggcctgctcctatcactcctgagatcaaacccagaggcagggttgctgccctagttctgccccagcaggccagggctgtgagggagagtggccttcccaggcaggcatcatagtactggtggtctctgcccccagagcagctggccctggtgattgggggcaccatcggggggctgctgctgctgctgttgatcggggcaagctgctgtctgtggagaaggttctgtgccaccctcacctatgaggagctgcctgggacaccagccatggccaccacagctgcctccagtgggcagcgggacaggccctgccagccgcatgctaggacccaactgagcaggtgaggcaggatgtggggccaagtgcgcccctggaatttccctcagggtggggtcgaaaaggaaagttctgtttatgggggtgcctcttctatgctgcttcggtgctgggagctatcacaaagaaaccccagaaacctcacatcagctattaggcaggtgttatgaaacccatgttccaggtgaggaatctgaggctcagtgcacataagcaacaggtccagagaacacaattagtaagtggcagaacaggaatccaaacccagactggctgacactgtcaggtgctgtgttccttctccaaatcccactgctgtgtgtgtgtgtgtgtgtgtgtgtgcgtgtgtgtgtgtgtgttgcctggtatgggcccagaaaatggtgccctggcctcctcctggctcccgatggcttttcttcctccagcccctggtgctcaaccgtcctggctgagcgctctgagaccacaccattcacttgccacctacatgttgtctccctgactctggacaggccaccagctgtgccattcgtggtgcccccaacccttcaaggccgagattgggtgcccctgcacagtggagagtgggccgatgccccatgggacccctgcccggcatcagagctgctgcctcacacctccagcggcggccttggtgagtgtccttgccagggctgcccagaggtcagggtctgctcgggtggccccatctgctttcaccagcttggctccggaacacaacctgaaccagccagggatgccagggaccacccagggaccactctttctgggtgctttcatttatgaagtgcttgctgcaccccatgagggtgagatatggccttgggtgctgatttggagtgagacctcaccatgactctgagggggaggaattatcaccccattttacatagtcttaactgaggctgtaagcaacagattggaattggaacccaggcacgccatgtacagaacttgtgctgggtcccactctaggatgatgggttggttgaccaagaggacagaatggtaggggctgcaaacacagctttctgccacctctttgccctgaagatctaccaagagaccatcacaggaaccacccaataatcaccttggcccttctaatttgaagaggaagaagaaaggcaatgttttatcgctgagtcattccctagacgccatggaagggggctaggccaggtgatgggcactgtgtccttgaaacaggtcctgacctccaaggatgggggccaatcccagggggcaggactctgctggatccccagcctggccatgcaatgccttcatggtgagaaggcttcttggaggagctgcaccagagagaggggatgtgtttagcctggtgaggagagtggggcagatgtggtcaggctagctgaggctcagcagagacggatgggccaggatggggatgggtgcccagagcttgccactgtctcccatgcccctgccttcctctggcctgccagccctcccaccctctgtcataggagatgcatgtatggtgggggccatcaacccagagctgtacaagttcccagaggacaaaagtgagaccgacttccccgacggctgcctggggcggctgtggttctcggtggaatatgagcaggaggctgagcggctgctggtgggcttgatcaaggcacagcacctgcaagccccctcggagacctgcagccccctggtgaagctctacctgctgcccgatgagcggcgcttcctccaatccaagaccaaacgcaaaacctccaacccgcagtttgacgagcacttcatctttcaggtacagcttctggagcaggcagggtctggtgccctccgcgttgctgggaaggtgcagacctacaggagagcccagcctcctgtaccagccagggctctgcagcccccgggacccttgatgccaccagctctgctttacctagtctgctaggttaaggcctataggagctgatccctgatagaggggcaggggagagatttggtgagtggtgaccagaagcctgggcttccctgtcctgactacctggaagagagtgggtgaaaacacaattttagagcaactactgaatgccaggccctggcctatggggctcaggggaattatcccaaaggcctgaagcactatggggtttctggcaagtttatccaaggaaggcaaaagacaggcctcagcgtgaatgcagaagcttcctgtgctgtcagaggccagcgcggggcccgagtgccctcacagggtaggtgtggtgccttgctgcactctgggctggccggcttagggtctggaggtggagagtctattggggcaccgagccagtttcacaggggcctgggagccttagcaggtgactgggggcccttaggggaaggagtcatcgagacctgccaagaggccttggacaaacatgttctcaagagctgggtggcaagctagccaagaggtgaggttcagccagtcagctttcaggaggagtgtgactgcggaggccagggccatcacttgtgccttccgccctggctgagagctgggaagaggggtgccatcgggcctggtcccgggccgtctttctgaggccagggctgtgagaattcacaggtgaatcgctcttctcaagacatcagaatccaaggctgcagccttgctgacgtgcgacacgtcatgcttgcaggctaatttttcttagctcatcacttccccactctatctcgccccagcttgatccaatccctctgtggaaaagggagaaggggaaagaaaagaaaatcaatattaatgggccatctgctggaggtcagacactgtgattggggttttacaaccagagaggaagacccataatccccatttcacaggcgaggaggccaaatctcagggaggagagagctggcatgcccagctctgacagcagagacaggccggtgccctgggctcctgggcctttgctacagtgcagggtggtggcggagccacactcaccgtgcagccatgtcacttggtgctccggttaaacggcagattccaattcatgaatctgggctggggcccaagatcctgcatttctaacagggctccaagtggtggtagacgctacaggtcctcggaccacactctgtgtaccaaggtcctggcacctacccccactttccaggggtacacggctctgctgctgagaagggtcccctgaaaatgcctaggtttgggggatgtgggtccctggttgagacacccgttcccaaaagcacccatgtccagaataacaagtcacaccatcccatcccctacccccacgcctgactctggctggtgtccttgtcccccccaggtgtccagcaagaccatcacccagagggtgctgaagttctccgtctaccacgtggacaggcagaggaagcaccagctcctgggccaggtgctcttccccttgaagaatgagaccctagtgggggactgccggcgtgtcatctggagagacctggaggctgagagcctggaggtatggtcaaggtcaccatgcctatgccactgagcatcagctggcaggtgtgcacagggcccagcacctgctggcggcatcagccctcagcatcctgcacaccaccctacaacagtgactcagggaggagggcccaggccccaagcagcatgggacaggtgggaacggacctgcccctgggcagggagggcctgcttgaggtcctgttgtcacactggccatcagaccccctggagcaacctgaaatatccacatttggattcttatctaggttagacagctgtgagagatgacaccacaaatggtccagcccagggaaatgtttcctccagcccaccacccccaggaaggccccagctggctcagacctgggtgtgactccttagctgtggtccacaggactgcacaagccccttaaactctccagaccacagttgccccatccttaaaatggcagtggaactcaaaggggaccatgcgggtgtgtcgcatgggccgctaggaggaagcgggaggctctctgggggttctgtgaccccttcagcacttgccagagtaacaggatggggtgcttccatcttggcctccccagcccccctcggagtttggcgacctccagttctgcctcagctacaacgactacctgagccgcctgacggtggttgtgctgcgtgccaagggcctccggctccaggaggacagaggcattgtcagtgagttcctccctttcctcctggggaaggtcccacccaccgagcttacagcctggggctacagtccaacctcatccctgaccatccagtttctgcttgcatacacctatcatggagtgctcactacctcacaagacgtgctgtccctcggtcgacagttctggtgcaggaagcctcttcctgtgttgaacccaaagctgcatctccttggcctcccctacggagggttctaacccagccgcaataccaggccctgcccctcctgtttcccgaggcagcgtcttggctctttgaactgtcctgcctgcctccacctccacctttccatcagcggcatgggtccagttcctccagggtgaggcccgcacctccctccccacaggggaagagcccccgactcaatgggcactgatgcttggcctcccagaatacaggagctgcagaaggggaggccttggttcaccccacatgtcccaccccatttgggctcaccccacacatcccacccatcccagtgaggtggtggtggtcagccacctgtttgtgttcacatctggggtcaccgtaagccaggcaggatccagaccttccactgtgactctgaccctcacccaccaaatcttagccctctgtacaaggtgtttaaggggccccagggggcctgggggcccagtgagcagccccccaacagggagggacaggcttgcggtgctaggctctggtaaaccagggcctgcaggagccgtgggtactttcctgatgcaaagaggaaggaaaaggaagggagcggagccccgcctgggccgcagggcagtgcactcctcagccggcttcctctggtcacgccggcggggccgcagcactgtgtgaggggtggggccctggcacctagcttgggcacgtgccctcctagccggacctcccacaggcaggggctctgctcccacctgcctctgccagcccactagtgctcaccgttccctaggtgtgtttgtcaaagtgtctctgatgaaccacaacaagtttgtcaagtgcaagaagacttcagctgtgctgggctccatcaaccctgtgtacaatgagaccttcagcttcaaggccgatgccaccgagctggataccgctagcctcagcctgactgtggtgcagaacatggaaggggacagtaaggccacaccctaccctgggctgctgggatggggaccacgaggggctgccgagtgttcaggcagagtgagtgcctcctgtcctgacctcagaaggagccgtacgagctccctccctggttaaggaaactagtgctcagaaaggctgaaatattgcccaaggcctgggtttcaggcccagctttagtccagttgagctctgtctgtggcaccctagaaacaggttaagcagccgggcatgctggctcacatctgtaatcccagcaccttgggaggccaaggtgggtggatcacttgagctcaggagttcaagaccagcctggccaacatggtgaaacgctcatctctactaaaaatacaataattagctgggcgtggtggcacacccctgtaatcccagctacttgggaggttgaggtgggaggatctcttgaacccaggaggcgaggctgctgaatctgtcaaaaaaaaaaaaaaaaaaaaaaagggccgggcacggtggctcacacctgtaatcccagcactttgggaggccgaggtaggcagatcacgaggtcaggagatcgagaccatcctggctaacacagtgaaaccacgtctctactaaaaatacaaaaaattagctgggtgtggtggctggcgcctgtagtcccagctacttgggaggctgaggcaggagaatggcatgagcctgggaggcggagcttgcagtgagccgagatcgcaccactgcattccagcctgggcaacagagcgagacttcgtctcaaaaaaaaaaaaagaggttggctgggtgcggtggctcacgcctataatcctagcactttgggagaccgagaggggtggattacgacatcaagagatcaagaccatcctggccaacatagtaaaattctgtctgtactaaaaatacaaaagttagctaggcgtggtggtgcacgcctgtaggcccaactactcgggaggctgaagcagaagaatcacttgaacccgggaggcagaggttgcagtgagccaagatcttgcaactgcactccagcctgtccacagagcgagactctgtcaaaaaaaaaaaaaagaaaagaaaagaaaaagaaagaggttaagcaatggcctctgctgccctctcctggagcaaatcacccgagagagtgggaggggccaggcctgccaccagcccagggacctggtgctctgaccttcctcgtgccctccagatgagactttggggttctgggcgagttctgtcagccagctcccacactgccccacaccccagcacccactgccactctggggaaacagagccatcaggccgtggctggccacatggcctggacttaagacccttctccacggtggccagtgaatgttactgctgaatgtactctcggatggccgaggccttctttctagaggggccctttcctccctcagctctttggcataaggtagacttaatacggccccacagaagggtgtggggcagagctggtggccctcaaggagagagtctttcagggctctccttcctcccaatctcccagggggagaagcagcccttccagctgcagagcaaaggcagggcccctttggggcctgtcagctcccactcagagaggaggggagttgctacttcctcctggggaggaggagggaggaaaggaggtcactggggacggggcttctgtgctcaggagcacaccggtgctctccctcccctgcagagagccagcagctgggccgagtggtggtgggcccctacatgtacacccgcggcagagagctggagcactgggacgagatgctcagcaagcccaaggagctggtgaagcgctggcatgcgctctgccgcaccacggagccctgacccttcgcccagcaccgcggttccgctttgggagccgaccatcctcgcagttgcatgtgacagccacagccacacgcatggacgtttcatccaacagctccccgagctgccagccagcccgagccaggaggacgtgagtgctgatatgcaggagagaagaggggacaaagaagccctggcccggtcagcggctctggccatacagccttccgacacactccctcctccttatctgcggggctgcctgggctcggaatcccggctcctggtcctcacagccctgatttggaccagaatctcagatgctcagaagaaagatcctgtttagtgatgacccagctctacctgctgaatggacctgcagggtaaacttgggtgcctccatctgggaaagctgatgatgtgttcatgcagtcgatgaccctcactgctttttcagccagggtttctctgccttctgcctggcagagaaaacacactgctatggggaaaatcacagggagggcgctgtgaccagcgcactcaggcaccaagtgtcggcatggctcactgtgctgggtgaaggcctccccgagcattaggtcctccacggggctgtgtcaaatgccctcccacattgtatcaagtctgcccatggcccaccctccccacagtccaaaaccacacagccctggttctccagctgttctgctgctgtttctgtgctctccctgattaagagcattcagttcctgggctctccctttgagcaggaaatggtgaaagcatgtggctatggtatagcccacagggctgagattgctgtgttgcagtattgatgtaaaatttgttaagaaggaagtacccacagatcactgccatcaactccccagaagttgcactcaagctagtgagcagcccttgtgcttgtcacagttactgtaacaggtagtgtgtatttgcacctggcatcgtgcagcctgcacgtcaacacgttgttttgtgtaactagaacagcacatggaaccactatctctttctcttttttccttctttttcttttttttttttattttaattttttgagacagagtttccctcttgtcacccaggctggagtgcaatggcgtgatctcggctcactgcaccctccacctcccaggttcaagcgattctcctgcctcagcctcccaagtagctgggattactggcgcccgccaccatgcctggctaattttttttatttttagtagagacggaattttaccatgttggctaggctggtctcaaattcctggcctcaggtgatccacctgcctcagcctcccaaagtgctgggattacaggcatgagtcaccgcacccagcccgaccagtatctttttcttatgcagtgaaacaactttagcaaaagaggcaatgaatgttatactgagtttctacctctttaactccacctccaatttctgtcaatctacaaacacaagtgtcgcctcgcagtgtttcgtatgaacagaatatcttgtgtttgctttttgtcacttatttcacttgcacattttttgtttgtttgtttgtttgtttgtttgttttttgagatggagtcttgctctgtcgcccaggctggagtgcggtggcgcgatctaggcttactgcaagctccgcctcccgggtttacttacaccactgtcctgcctcagcctccggagtagctgggactacagacacctgccaccacgccctgctaattttttgtattttcaagtagagacggggtttcactgtgttagccaggatggtctcgatctcctgacctcatgatctacccgcctcggcctcccaaagtgctgggattacaggcgtgagccaccacgcccggcccacttgcacattttcaaagtagtccgcaaagctgtagtttctaatagcttcatagctcacatgtaataggggttctctgtgtgtttatagagcaggctactacagtggaactgtttctgtttcatctgacatccggatagatgccagccacccccacattccaaggtgagatttctgactagcagtgacttttctagggccgcttggaaaagttgataagtatccttttctgcaggacagagtagactggtatctctgactcatccctgaaaaatctaaatggcaagagactagctggctctctgctctgatggggaggaggttgttgtttgggctgttctctacagacatagtcagggcaaaaagcatacgcatgcttcccatggaccagagaaacctggcctgggttgtctcaaatcctgtccacaaggcaactccagaagaaagaagccctttacatttccataaaacactttagaatcagctagtcaatttccacaaaataaagtgctagaatttgattggatttaattgattatgtagaacaatttgggggccatttgacatcattaaaatattcaatcttcctattcattaacatggtatatctcttcactttaagtcttttgtatgtttctcagaactatttttgtggttttcagtaaagtgttcttgcacatccttcaatagatttattcttagacgttttatatttgtttatggctagtatatacagattctgttgctacaaaactatgttgaccttgttatccagtgagaggctttgtgacattcatttaaattgtaataatttgcagattatttttgtataatcatgtcctctgtgaatgacagttttatttcttcctttcttaatctttatgccttatttagctcttgccaaactgcagtggctgagcaattggacaagataaagaaataaaagtgatccagatcataaagaaagaagtaaaactatatctgcacatgacataatcttgtctatggaaaatcctaaggaatccacacacaaaaaaactactagagctaataagtttggcaaggttgcaagatataaaattggtatacaaattgcagtggctaggacctccagcagaatgctgactataagtagtgatagtgggtattcttgtccatcctcaatctcaggggtggtgggtgtggcatgtggagagttgtcaatattcaccatgaagtttgatggttgttataggatttttaatgtactcattaacatatattctcaagctgttaaaaagatttttttaattacaaataaggttaaatttctctcaaatacttactctgcaccttttgaaataattttatttttctcctttattctttggatgtgatgacttatactaattgactgttgaatgtcaaaccaaacttaacattcttgtaatagaaaccagcagggtgtgtacacttttgtgtgtgtgtgcaggtttatacacataaacacaataatacttggacttatttatttaaaatttagatttattagagggagcatggccataaaataaaataaaataaaatttagatttaagtcgagctcagtggctcacatctattatccccgcactttggaaggccaaggcaggtagattgtctaagctcaggaatttgagaccaacgtggtgaaactcggtctctacaaaaaccacaaaaattagccaggtatggtgtcacatgcctgttgtcccagctacttggagggctggggcaggagtattgcgtgagcccgggaggttaaggctgaagtgagtcatgttcacgccactgcactacagcttggataacaaagcgagactctgtctccaaaaataaaataagtaaataaataaataaataaaatttagatcaatttgctgttatatttttatataaactatgtttatgacataagtataaacaaaaaaataaaataagtaaataaataaataaaatttagattaatttgctgttatatttttatataagctatgtttatgacagactttcctataatattcttatcataatgttcttgcacttgaaagaatgtgcattctgcagttgtgtgcaggtgttatgtgtatttcaactgggtcaagtttgttaatcaggttggtcaaattatctacgtctttactgatatttttgtctgtttttctataaattactgagagaggataaagcctgccactgttattatgaatttgtttatttctcctttgagttttgttagtttttgttttatgcatttagaggttgtgttattaggctcatacccatttaaaattgatgttttctggtagagtgaacctttattatgtgaaatggctttctctaccactcacaatggtatttttttcactttcccccttatttttgaattttcaatgttcttataatgatgtcatgtctcttgaatagagttgttttaatcaagtctgtcaaattttgtcttttgtgtatttcgtgaatttacatttattgtaattactgatatagttgtgttcataaataccatcttactacttgtttccatttgtcttacccatttttgtttttattttttcttttctgttgctttctttctgattatttttttaattccgtttccccccctaccattggttttacttacacattcttttataatttctttagtggtttcctccacagattacaacttctgtacattattataatctaatacaaattttactttttattgtttcccagacaatgctatgatctcacaatactcaatctctatttacctccattctactcttgcatgtatattattattactcattttaatttcacatatattttacacctaacgagacattattattattgctatgtgcagtcaatattcatttgtattcacccacatattcactctgttttttttttattatttcctgcatttctgtgattctatcatagatcagttttcttctacctgaagaattccctttagtattttttgtgtatgcacatctgctggcagcaaattttctcaggtttttttgtgtttttttgtttgcttgtttttgagacagggtctcactctgtcgcccaggctggagtgcagtggcatgatcatggttcactgtagcctcaacctcctaggttcaagcagtcctcccacctcagcctcccgagtagcgggactacaggcaggcaccaccatacctggctaattcttttgtattttttgtagagaagggatttcaccatgttgctcaggctggtctcaaactccagagctcaaacagtctgcctgctttgacctcccaaaggactgggattacaggccacctcacccagcctttctcagtttttgaatagaaacatctatttcaaattcatttttaagtatattttgtgaatataggattacaggttgacacttttttctttgaggaacttcagaatggcactccattatcttctcacttccatcatttctgttgacaagtgattttcagtgctattgtttctcctttgagagtaatgtgtcagtaacatgcactggctcacgcccgtcatcccagcacccttgagcccaggagttcaaaaccagcccaggcaacagagcaagatcccccccctctacaaaagaaaacgacaggagggaggcaggaaggaggagagagggagggaggggaaaagaaaaaagaaaagaagaaatgtgtccctcctacctgcctctagctgcttttaatgttttttccttgtctttcatttgcagcagtttaagtatagtgtgcctgggtcgggtgcggtggctcacgcctataatcccagcactttgggaggccaaggccagtggatcacctgaggtcagaagtttgagaccaacctggccaacatggtgaaaccccgtctccactaaaaaatccaaaaattagccaggcatggtggcgcgtgcctgtaatcccagctattcgggagactgaggcaggagaatcgcttgaccttggggaggcagaggttgcagtgagctgagatcgcgcgccaccgtactccagcctgggtgacaaagaaaaactccgtctcaaaaaataataataaaaaaaaagtatagtgtgcctggatgcagttttgtttttatttatcctgcttggggatcataaagctttatcagttttggaaagttctcagcctatatttatttaactgttccttctgccccatcttcctcccttctaagactccagttacatatgtgttaggcctgttcaccacttcccacaagtatcttatgttctttgctgtattttccatactctttgtctctgttcttcagcttagagtttttattctgtcctatattacagttcaaagaatgttccttctgctaaatctaattgtagttaacccatatgctaagtagttaatttcaattattgtatttttaagttttaaatttccatttcattctttcttgtagattccagttctttgatgaaagtctctattccacccatcaagtctgtgtctgataacaccaatatctgggtcattagtggctccgttttgttgtgtctgttttcccctccttcctgttttgtggtgtgtttgatcacttattgttgaatgctaaccattataataaattttagtggctccaggaaacatgatctgaaaacaatgtctgtctcaagggagggtttaccatgtcatctgatagacagagtgggaagattttaccttaatccaatggtaccgaactgactagagtctatgttgcagtttttggaaggcttcatctccatctctggtttgcccgtctatctagagtgtggtcctccaaggattccaactgagtgtctgatgtgattattaggcttcttttccttggtgggtcctgaactccaacttttatctcattaatatgacactgccaaaacctgctgcttttcatagcctttctgcatagcttaactcagcagatgcctcaaggggaaagtgttccttttctgtgtctcccttctacatgatatcttggccccttcagttccagctgccttgacaacctcagtctccatttcttgtctctccagctgaagactctgctgcctttgctgcctcttagctatggccgtctgcccaaatgctcggcctcttagctaaaatcagcacgtttcctgaagggaaaagtagttcacagagggccagcttgcctccttgtgtttttcttcttttgagattatgacccttcaaatgtttgttaactgggaagctttccaaaaactttttaaaaaagttttctgtgttttattcagcctttccagttgttcttggaatgagtgttggtctgcctcaagcagaaaaaaaattctcagaattcttttctcagaaaaaggattctcagcagagagtgattttatacagggaatgggattaaacaattcttgggaaagctggtgaagccaacgagggaacagttacttttatcagtgtgcaatttttttgctataatggtgcataacaactaatcacaacatgtcaatgccatacttaaataagcactcatttctaacacatctgtgggttggctggaggtggtctgagctagggtaggcaactcactttttttttttttttttagggtttcactcttgttgcccaggctggagtgcagtggcgccatctcagctcactgcaacctccgcctcccaggttcaagtgattctcctgcctcagtctcctgagtagctgggattacaggcatgcgctaccacgcccggctaattttgtctgccttccttcctttctttcctttctttctttcaacggagttttgctcttgttgcccaggctggagtgcaatggcatgatctcggctcaccgcaacctctgcctcccaggttcaagcgattctcctgcctcagcctcccaagtagctgggattacaggcatgtgccaccacgcccggctacttttgtatttttagtagaaacggggtttctccatgttggccaggctgatctcgaactcccgacctcaggtaatccgcctgcctcggcctcccaaagtgctgagattacaggcgtgagccactgcgccaggcctaattttgtattttttagtagaaacgggggtttctccatgttggtcaggctcgtctcgaactccggacctcaggtgatctgcctgtctcggcctcccaaagtgctgggattacaggtgtgagccactgcgctgggcctggcaactcactttcaagctggctgggcttggctcctcacatttgtgcattctgaacacaggctgcagggacagctgctacccccagggaaagctcttttcatggtgaaggcagaagcataaaaaggcaagctgcattgtgcagatgcatatctgtgtctctccttatgttgtgtcatccaatatcccattggccaaagcacgtcacatagccaagctccaaatcaagggtcagagaagtaaatgatatctttttcctgaggggaactgcaacactacagggcaatggacacagccacagggaggggtgaagaattcaggtggacaacgcaatgaaccatgctgatgtttcctggagctgggatcttcaggaatttgtgcttggctgtgcccatccagtcaccaaggaggaacccccctactgcagagctgcttttgggcctcgatgccattgttgccaaactgacattccatgatgaaaatggactgtaatttgtacagctatttgccagttacgtttttgctattttgcactgtggaaatctttgcccaaattactgcaagagtctcgagcatcctgctgtcataagtgcagagtcaaaggaagaaaacgatgattttttaaaccatctttctgctttctagtctcatctgagtgcctcacatttggcagaatcaacctggaatcctgctcataagactatcagggaaatataattcccagacttccatttccagaaaaatgtaataaatacttttaaaggggatggagatggtaccgtgtgctaaccccactctgagacaaacctgggtcacaggaaccatagggaagatgtctgcagtagaaggggacctcgaagtactcaagtacttggctcacaacagcactattcacataaagcctggcctgccccttggtgacctccttcccttacgcctctagactctactaggtgatcagaaatccctgcaagctagttggggagggaagagtgaaagtgaaaaatggagaggaaacactgctacccgcccaatgcctggagccaaatgcaagcctgggccaggcttgggggaggaatcaagaggaagcttaaacttaaaatgaaatcgaaagtttagactcctacatgggattggacattttaaatgctgaacagagcctatttttatagctagaagttacaggacacatttttggtcaactgagaatgatccaaaaatcatgtgaattttgtgatccagaaagtcacagaacatgccctagattttatcccaggggcagggaggagtgacctgcagagcaagtttgaattggtaaatagaaaacaagaataaaatagtttgctgtttacattccataagcctggctctttcaacatcatggttatatttcttggttgaatttagtatgccactatgacgccggattgtgatatttgcctaggatgttttgtcctaatatttagtatggaattatttgcccaaatcacctgcccctctccacttgtagctttatttcaagaggtatgtttctcaaagtggagtgactgccagagtgggagaaaggagctagcccttaccgctgtagtaggtctttgtacatcagcttggtaaatctgcaaggccccccctcttcccccctcccccccaaccccccccccaccaggagccttccccacgtgtggacaagagagatgggaggatccgggaggatgtgccgtttctcagggtcccacagctagaaggtgatggagctagaatttaaatcagattccaaatgtctaaaaatactgtcattatcacatattaccagagacacctcaaaaaagacagagacgccctgcagggccgcaacattcccgcagcctggtagggtctgttgggggccccatgcctgtgagagccgctcctgccggtgcagcaccggggaggctgtgcattcaacgagtccttcctcccttctcctttcattccattgctgccttccttcctcccttccccctccgctccttcccctagaccttccttccgccctccctaccccccgcacgtctctccctaccgtccttctttctgtgtgaattatctgttcatctccattgctgcagtaccgtctggcaaatcatctgcttggatgctcctggctttttgagaatcggctggcatcagggtgctgactgacaaacttcccggggtctgggcactgtggggacggagcctgcagacggcggtgtccccgctaggagagccgtggggacgtgattaacaggtcaggccgggccgcgaggtggcggaggggccgcgcttgcgggcgtggggtgctggcagagcgcgatccgcggcctgtggcccgcagccggacccgagcgacagcctcccgcagcgtgtctccagcgccctctactgttcagcatcctccctgccgcgaggggagccgcggaaggggattctggctgtgcccacagagcaggtattaaaggatggatttggaggtgcgaggccatacattgacaaccggtataccatgcgtcccaaaaccttcccttgtgtccccttccaaacactacctctccctccccaccaaaataaccaacgacctgatttttatggcaaacactgcttttaccacctaaccatgcaacttctctctctctctctctctctctcacacacacacacacacacacacacacatatatatgtatatatatatatgtgtatatatatatatgtatatatatatgtatatatatatatgtgtatatatatatatatgtgtatatatatatgtgtgtatatatatatatgtatatatatatatatatatgaagcctgttgtgattttgattgggattgcattgagatttttttctttttccatttcttttttttttttttttttgagacagagtcttgctctgtctcccaggctggagtgcagtggcctgatcttggctcactacaagctccgcctcccgggttcacgccattctcctgcctcagcctcccgagtagctgggactacaggcgcccgccaccacgcccggctaattttttgtattttttttttttttttttttttagtagagacggggtttcaccgtgttaaccaggatggtctcgatctcctgacctcatgatctgcccgcctcagcctcccaaagtgctgggattacaggcgtgagccactgcgcccggggttgcattgagtttataagtcaattcaggggagaattgacatctttaaaatactgggtcatctaatcagttcacatggtatgtacttctgtttatttacctcttctctcatttctctaaataatatttaaagtgtcatggacatctttcattaaatttttccccagacatttgaatttttatgctaccataaatggtattgttttaaaatgttttattttctaactcttgctggtatacagaaataaaattggttttcctattttgaccatttattcagtcatgctaaactcactaattctaataacttgtctctggattcttttgagttgttaatatacatacatagttttgtatcttaggtccaatcttagtatttttatttcaacttttttgccttattactcttgttaggaataccaggaaagtattgaatacaagtgatgataatggacatctttgtcttatttctgttctcagaaatgtttccacatttcattattaaggaaaatatttaccatagttgtagctccttgagataaacagtgttaaaattttttggccactctccattgatttaatgtatagttttctaaaaatgaaatattttacatactgtttctgagtaagattttttacccaatgcgctgtaaacaccaaaatcatatatttttatatagttttacttggcttaccttgtttttttgctttaacttgaaaaatatttccctgttaggccaggcgcagtggctcacgcctgtaatcccagcactttgggagagcgaggcgagaggctcacctaagcctgggagtctgagaccagtctggccaacatggaaaaaccccatctctattaaaaatacaaaattagccaggcatggaggtgcatgcctgtaatcccagctactcgggaggctgaggcagaagaattgcttgaacctgagaggtggaggttgcggtgagccaagatcgtgccattgcactccagcctgggcaacaagagcaaaactctgtctcaaaaaaaaaaaaaaaaaatccctgtttattctttttttataatcgttttattgagatataattcacatatatgattcatccatttaaaatgtataattcgatggttattggaatatttacatttctgtttaattccctcaattaatttttacatcaacttgtcaacttgtataggccatccctcagggactttgtttattgttgaattaactctgtatagtacatcttcccaaacagcaggagcacagtagagtgttccactacttcttgtctccttttatttccctcatgatatttaaatcatttcctttcaataaattaagctcttaaagtttttggttttatctgtgagcatgattatttttatttagaattatgtattactgttatatggtaatataattttgtaaatttgttatgtgtaattaatatattactagcatattttttatttcctgggattatttttcttaatatatattctagttattcaaaatagtgacattttaatttatttaagacttcttgttacgattacatacgtatttttattctcaaatcatatagccagcatttctactgctgaacaaaatgctttgaaatatcaataatacatatatctgacttttatctagaatacatatgtctgatcagtaaaaagacaaacaacccaataagataaatgtgcagatgacttgagagacacttcacaaatgaaggtatacaaatggccaatgagcacatgaaaagttgtgcatcattagtcatcagtgaaagagaaaccaaaaccaggaggttccactttacagcctctagaatggctacagtgaaaatgactgacatctcaaatgttgacaaggatgtacaacaactggaagcctccgttttggctgcggagagtgtaaaactgcacaactttggagcactgtttggcagattcttctcaagttaaatatatacctatccaataaactgacaatctcagtcctagctatttaaatccctgccccaacaaaaacttatgtccacaacaagacttgttttaaaaatgtttttagcagctttattcataatagttcgaaactggaaagaactcaaatgaccttcaacaggcgaatggataatatattcacacattgatatattactgaacaataaaaaagaataaactgctgattcacataaaaatatggataagcctgaaaaacattcttaggttaaaaaaagccagttacaaaggaatatatactgtatgatttcatttacatgaagtccaaacaaagatcaaactagtgtatagtgatagaaatcagaatagtggttggccatcatggatggaggagactgactggaagtggggatgaatgaaaattctagggtgatggaaatgctccatatcttgtttggggttcagttacatgaatgtatatatttgttaaaactctaaattgtacacttaagacctgtgcatttaactatacgttttcatgcaatttttttttaaattccaagaaaaaggatctgattgacccaatttgagtcaggcatcctactgccttgcataatcagtttttgccaaggaatccaaacaagcagtatagacgtgacctagagaaggggcaccagaatgggcttggctcccacccacaaagttccaatatctcctacatgatgtcagttttggggaccaaaaccatatcatctttttctattatttggatgtgatctttttatttatgtatgtttgttgttggttttatttttttagagacagggtctcgctttgtcatccaggctggagtgtagtggcagatcatagctcactgcagcctcaaactcccgggctcaagtgatcttcctgcctcagcctcttgagtagtgtgtcaccatgcctggctaattttttttttttttttttttagtgttttatagagacaagatcttgctatgttgtccaggctggtctccaattcctggcctcaagcaatcctcccatctcaggctcccaaggtacagggattacgggagtgagccaccacaccggaactgatctttctaacacagggaaattgtattctttagaagtggaggaatatttcctagtaatttgatcaagtaaaaataattataataaagaaggtaaaatcaagccctaattccccatgtaggggaataatatcattttggtaagattcttccagacagtatgattaggatgttacataaatcaaactgtgctatatacagtatgcagagaaggaaattccttagcttgtctaaagtctgatagtgtgaagaatttgctgacctgctctccatgcctgtctgagcacgagtgaagtgaatcagagagagattgcaagatggagaaaggaggtacagttggagagagtggagggggcaggaaagaccagacagagctgcatctcccatgaaaacaactgtgtacataagatagagtgagtacatagagtacatagaagagtgagctctgaaagaactctcacatggaccccagaaagaggagtactcaacgcctgctgcacagaaggcatcaacagttaagtactggctagaaaagcggagtccatcaaaggagaggaccacagtggtagctgcctggtaagtaccactgtcccctttccttcttttctccctccccagctcatggaggagctaggcctcaggaagctgggaaggaatggggagaattcacctcggtgccagttcacgccctccctccagctccaacagctggagtcaaaggaaaggaagggtgcacctatctcctccccattccaagtccctttagtgactagctggacatgctctggagaagagcaaaatgaggttggaatttaaacaataccagactttctaaaacacaatgcctgggaagttatgtgaggcatgtgagacatgaggggatggaaaagggattcaacagagcatagttgaaatcaatgatttaaaaaaacaaaaaaactggctgatggctcatacctgtaatccaagctctttaggaggctgaggcaggtggattgcttgagcccaggagttccagaccagcctgggcaacatggcaaaactccatctctacaaaaaatacaaaaattatccaggtgtggtggcacatgcctgtagccccagttaccaaggaggctgaggtgggaggatagcttgagcctgagaggcagaggttgcagtgagctgagatcataccactgcactccagcctgggcaacagagtgagaccctgtatcaaaaaaaaaaaaaaatttccatagttaataccctttaaatgtggactgctaaataaagctaaagctaaggaacattaaagaatactttattaattgaaaaagcatgctcttcttaaatagtaagccttaaccactgaaaacatgtccaaatgatccataaattcaaagcaatctcattaaaaatatcaatgggataaaaatgattctaaacttatctcaagaacagatggcatgcccactaggatggctataatcaaaaagtcagataataataaaaagtgctggtgaggatgtggagaaatcagaactccaatgcattctcatgggaatgtaaaatagtgcacctgcattagaaaagtttggcagttcctcaaatggttaaaccatacaacccagcaattccactcctgggtacatacccaagagaaatgaaaatatacatccacacaaagacttgcacacaaatgttcatgatagtacaattaaaaataaccaaaaagtgggaaaaactcagttggccatcaactgatgaatagatacataaaatgcggtatatccatacaatggaatattatttggcaataaaaacaatgaagtagtgatacatgctacatgtgtgaaccttgaaaacactataccaagtgaaagaaatcagttacaaaggaccacatattgtatgattccattcatgtgaaatgtcagaatagtgaaatctatacagccactaagtagaagagtggttacctagggttgggggaaagggggtgggtatggaggagcgactgttagctcctcttaaggaagagctgtggggtggtatagttaatgtaactatggatgattcttttgggggtgatgaaatgttccaaaattgagtgtgctgatggtcacacactctgaatatactaaaaaacactgcaacatatactcttaatggggaataaaaaagaacagatgggcaaagatgtctgagaaaaacaattttaatgaagaaaaatatgggggtacttttcctatcagatgtaaagttataataattctaactgtatggttctggctcagcaataaatatagaacaatgaaacagactagaaagtccacaggtaatgctagcaggaataataatttcatattataataaagatcacatctatgtcactgatgggaaagaaagaaatcaatagtgttgggacaaccagctgaccattttaggaaaatgaatcagttagatccattcataccatgcactaaattttagataattaaagatttaaatacaaatataacaatcataaatgtttcagaaaattttttgaagaaaatgtgtataatcttatagtagaaaagaagctatctaggcatgccataaaatctagaaacaataaagaaaaagattgatgggttgatccacgtaaatatttatgatttctgcatgtcaaacatatataacaagcttgggaaaaatgtctgcaacacatgttaaaaattactaactttataaggagaacatactaatttaataaaaggcttctcccacataaaaatggtctaaggtaaaatatgaaaaagcaaactgcaaatgactgataagcatatgaagcaaatgtacaatcactttagcaataaaataattcaattaaggctgggcgcagtggttcacacctgtagtctcagtactttgggaggctgaggcaggcagatcacttgaggccagaagttcaagactagcctggccaacatggcaaaatcctgtctctactaaaaatacaaaaactagctgggcatggtggtgcacacctgtaatcccagctactcaggaggctgaggcaggagaatcgcttgaacccaggaggcagatgttgcagtgagccaagatcgcaccactgcactccagccagggtgacagagtgaaactgtgtctcaaaaaaaaagaaaaagaaaaaagaaaaagaaaacctcaaaaaaaattccaattaaaacagataaccttttttaaacctaacaactagtctttcacttatgccattcagtttagagagagtgtggaaaacttctgataggaatatatttcaggataacctttctgagaacattttaaaagtaggattcaagagcacacacaaatgatggaatcctgtgtagttgatatgatttaatctatgttgattgatttggaaagacgtatatggcaaattgtggagtaaaaaaagtacacactagatactggcctatatggaatggtcccatttatgtaaaattgtgtatgtgcatgcacagatctgtcttctatcagggtatctggaaaatgttcaacaaaatagtaacaatggttatctgttttgttttgttttttcagagacagggtcttgctctattgcccaggctggagtacagtggtgcaatcatagctcactgtagcctctaactcctgggctcatgccacacaatcctcctgcctcagcctcctgagtagctgggactacaggcatgtaccaccctgcgtggctctcgttatctgttgatactggaatttctgcttttttcctggtacagatacatacatacaagtactttgaccccaaaattctattttcttagaataaattcccagaaggaatgaaagatgtgtgcaaagactatcaatgagaatgttggccagacgtggtagtctacacctgtaatcccagcactttgggaggctgaggcaaaggggatcacttgaggccaggagtttagaccagcctgggcaacatggcaaaaacatgtctctacaaaaaatacaaaaagtgtccaggtatggaggcatatgcctgtagtcccagctactcataggaggctgaggcaggaggatcacttgagcccagggaggctgaggctgcagtgagccatgatcacaccactgcactccaacctggttaacagaatgtctctaaaaataaaataaaataagatgtagatacatgcaggaggctgaggtgatggatcacttgagcccaggagtttgagtccagcctgggcaacattgaaagactatatattttaaagcagacacatgtacaaaatcatacatgcataaaacaactgaaggaatatctattaaaatgttggcagcaattagctttggttggtagaataacagaagggttacttttctcactttcattcatccatattttccaaagttaaaaaaaaaaagaaacggcctggtgcagtggctcacgcctatagtcctagcactttgggaggccaaggcaagagggtcggttgagcccaggagctcaagaccagcctgggcaatgtagggagaccctgtctctacaaaaaataaaaaatcagttgttgtggtctgcccttatagtcccagctaccagggaggctgaggtggaaggattgcttgcgcccaggaggtagaggctacagtgagccataattgtgccactgtactccagcctgggtgacagagcaagaccgtctctcaaaaaaggcaaaacaaaacaaaacaaaaaacaaggaacatgcgtttttgtttaaaggaaaacgttttttttttaagtttataattttttttttttttttaaacagagtctcactctgtcacccaggctagagttgaactggcgtgatctcagctcactgcaagctccacctcccaggttcaagcaattctcctgcctcagcctcccaagtagctgggattacaggtgtgcaccaccacgcctggctaacttttgtatttttagtagagatgaggtttcaccatgttggccaggctggtctcaaactcctgacctcaagtgatctgcccgcctcagcctcccagagtgctgggattataggcgtgagccactgtgcctggccttaagtttataatttcttaacatggtgtttaattaagcctattcacaaatattcttaaataacacaccaaaataatttacttatactctaataggaaagattctacattaggatgcagaatctgaaggaaacaatcttcaatttcttgacttagacattcttggtaacagacccacacagtaattaggtagcacttatgtattgtgatattacctggggtgtttataagctgatcctttaataagctagactaagtgcagtaaatcagctcactctgcaaccaaccagtcccacctcctaactgctcctgaactgcaaagaccaaaagcctcagagaagacatatttcccaaactttcttgcagctaaagctctcagcgtgaatcatgttccatcaatgaaacacacacacatgtgcaatatggaagatgagtgaaatccaggctatcttcctgaagctactgttcctggcaagtgtagctgtggggactgagttttgggcagcagcaaataactcccagcttccatgtgcttgagagtcagttgctgggatgccagcagctgcatcctcagtctaagattgcagccaatgatgatgttttcatgaatccaccgttcacgtggcagcctcctggagctcagactgatgcctgctcctccagccttccaatacctttgcaaacacctgaattccacattaatctctctctgtttagaatacccagagtggcttgtgtttcctgggctgaaccctgcctggtaagtccattttaacaggcttctagatctttcctcaaaaactgtaaagctgatgatggttttgaaaaaaatcacgatttcttaacaacgtggaagcagagaggtcacctttagcaaatgtatgccttaagtgggtagaattcacttcttaataacaaatcaggttcaagacctccaaagacataatgacaattaattggcaaacctcatcccctctcacacatttctcccctgttgacattaaatcaagggccagaattaagctactgataaagacgaacactttattctaattgttctatgattcatgacctgtgttccaacacctagaaacccatcaggatacaaatatatcacttaaaataaggcacatagggatggttagtttttctgtctcattctatattgttctgagaaattacagatattttcttctaagaaaggcatgatcaactattcaagttttgctgaatctaaggtaatgtcagaatactcttaaacaacttacggcctcagatcccagtagtttagaattctagggacgatgtaaattcataatcactgtgaaaatgttatcctatcaaaactctgtagaaacatctatgcttttgcaataacagcgtaaaagacctcttctgatgagagagagagagagagggagagggagagagaaagaaaaaaaagaaagaaagaaagaaagaaagaaagaaagaaagaaagaaagaaagaaagaaagaaagaaagagagaaagaaagagaaagaaagaaagaaagaaagaaagaaagaaagaaagaaagaaagaaagaaagaaagaaagaaagaaagaaagaaagattagggagttggggtaaccaggtaatttaggccaatggattcaactgtgccttaagctggtactaccctcatttatgtgagtcaatcaagtcccccttttttgctcaagctactctgagttgggtttttatcacttgcaaccaagagtcatgactaacaaacccatcctactgttacctcttttgccttggctctgtattccacacagatttaatcctggcgctgatataattttgtttaaatatttcttcaccagcttgcctgtgaacttacagaaggcagacatttgtgtctttgcatttccagtgcctagcacatggtagacattcagcgaacgtctgcagggtggatcatgcacccaatgttgtcaactcatttgatgatcagccccctttcccccaaccaaaaaaaaaaaaaagatgtaaaatgaaacagcacagatcttactagtggggagaaaggtgaatgcctctaacgctgttagaaaaaggatacctctggggaaactaagtgactaacaaataaaaatgattctctaaaaataggagagctgtccctgcaagctgaactaacagaagatgaagaatgaggtctccctgaaatgcccaccataagactgccagatatgggactgctggatgacactctggctaccccactgagttttatgaaaacataacagaataaagacacttacttgtcaactcaggtaaagaatacacacagaaggtgtcttagtccattctgggtgctataacaaaataacagactgggcaatttataagtaacagaaacttattttttacagtttgaaggctgggatgatcaaggtgccagaaaattgagaatctagtgagggcttgctctctgcttcaaagatgacaccttctggctgtatcctgtggcagaaggggacaaagaagctccctcgggccactttcgtaagggcactgatcccattcacaagggcagagccctcatgatctaatcacctcccagatgccccacttctgaatgccatcagagatgaggtttcaacgtaagaattttgggaggacacattcagaccatagcaggagcaatgggctgatcctgatcccacttaaatagctcataacttctgtagatagctcagattcctcaggactggaggaaacagttcccaacctaaataagggctcctggaaatatgtgttaattaatgaaatacataccaacaactgtgaagagatgttggtgtgatctgttgactcacctgaaatggtttaaagatttcttcccaataggatgtgaagagccatctcttcctggggattatgttctggttgatgtagggattaggtctccacttgaggacgaagtggggaagggcacacttaagcgaacagctctcttggttggcctatattgactgggcagattttatatcagaattccaaatctctgcctagtgtggttatagttgagagagcacagattagaaggcgtcaactacaggctcaagtttcatcacccattcaacgaatcattgaagggagccaatgattttgtttgaattccagtctctctagatacaaaatggagtcaattctttctgtacccaccttattagttgctagacaaaactttggcaatcatttgctctaattcccttatctaccccacaaagaaactcatcagttaaagccttgttcttacctttcttggtcacagaaccctctgaggatttgttgaaagctatggatccttctccacagaaacatgcatttgtgtgtgtgtgctcccacaaaggcattttggcatattatttttgaaagaatcacaaaactcttgtggttcgttcttagggaagccaagttaaaaaacaacaaccacctctgaaccaaaggaatttttaaaaacatacacagggtaaaagaagcttgttcatgtcatcatgaatttattttcaggcaatatgacaatctattaacactcagcatactctgaacttacagaataagtaccacgccatacttcctcattaatgactatcattttacatgagcttcttccacaatcacaatgagagaacagattgctacatgtttgctggtaaatacattcagtaaggcactcaaatcctagacacgaactaaccacagaacgctcttccctgctttaataaattgaaacatgatctcatttccttcactttcaatactttttatagaaagacacgcttgtcttgaacttgtctaaacataggtttatataaactaatccattatcattatagttataatcaaggaaatgatttcacattgacggttttttaggtagggataagcgaaagcactgcagcagtttctgaaggagtgtcttctctgtggttccccatacttagtacgatgcctggaatgtagcagggactaaatacagtgaacaaatgggcaaacctttaattcccagggatctgctacatattgccttgactggtagatcatttctccagaagaaaggaagaaaccaaaagacaaaaacaatctttttaaacctcacaggattttcttagaaaaaagttttaatttatatatctagtgcaattctctttgtaaaatatatttcataaaaaatccaaagcaaaagccctgtcattcatttatttcaaaagacaaatcatttcagtacttcttccttgaaatgcctgcaatttcttcctctggcctcagagacgggcattggctccatgctttaccatgtcaggataaaaatccaggagggagaaatcttgttgtaatggatagctgttttcatctaacacaaaaaggctctgaatcttcaatacacaaggttctgcgctgactgccaacaaggagtggaacaggtctgccacaaccatcccataggtgatctctgaggaaggaactgcagaagacgaaaacacagagctctcaagatcgctgctagcttgacaggagcacacacattgaatggtttcattgtttcttttggttcctcaagtctcaaacccattttaaatttctcctcccggccagtagcggtggctcacacctgtaatcccagcactctgggagacggaggtggctggattacttgaggtcaggagttcgagacatgcctggccaacacagtaaaaccctgtctctactaaaaatacaaaaattagccgggagtggtggcacatgcctgtaatcccagctactcgggaagctgaggcaggagatttgcttgaacccaggaggtagaggttgcaatgagctgagattgtgccactgcactccagcctgggcaacagagcaagactctgcctctaaataaataaacaggtaagtaaactactctttctataccttctctttctagttacaagctattgaggcactccagagtgacagcatgtgatccccctgacacaagaaacaggcccagataacacaccgttcagaccaacagcagttctggttatgctgcagtacatcagacgagtgctcttatccatccacagttcttatcacagttacttatgcatatattcattttttatataaaagaatcttgaatcggtcacttaaatattgaatctcaataataaaaaatactaaaagtatagctaaatgtgttattttattttgcatttgtcctacactcttcccctcacttttttaggacatgtaatcaagacatttgggaggttgttcaataccagaatgacagagcaccatcgaccatgctcagactgtactaaccccttgacaattatcacagtctttcttggatggggactacagagtcctggaggaccaatgacatattttggggggtatgataattctctacaataacttttaaattttgtattttcactgcaataaactaaaacataaccaatattagtaatagtctgcatggtctgatgaccactttatgaccaatgacattttgacttatgatcacaatctaattaatgccaagaagtacaactttaattgtctcaagaatggacaaaacactgaagtatatgtgatatgagaattatgcttctctaagagataaagactaatttacattatgcaaaaaagaagagataggccggacacggcagctcacgcctgtaatcccagcactttgggagaccgaggcaggcagatcacctgaggttgggagttcaagaccagcctgactaacatagagaaaccccatatctactaaaaatacaaaattagccgggcatggtggcacatgcctgtaatcccagctacttgggaaactgaggcaggagacttgcttgaatccaggaggcagaggttatggtgaactgagatcgcgccacagcactccagtctaggcaacaagagcaaaactccatctcaaaaaaaaaaagaagagataacactgaaaatatataagtaacattaagaaaaggaatgaaaatagccaaaagaataaaaatgaaataaagaaaatgggggaaaaaacggagagaggcttctaattaagatgtagaaagctggaaaaagtggctcctaccctaacagttactggaaaaaactgaataaatataaaatcatcattttcttgaatacacatgagaaccaaggttgtaaaacagccaaaaagactgaaacataaggagacaggtgcctccagggagatggaacaggagcacaggttcccttggggcaggccttgggaagaagacaggtcctccatacaggcaggaaagaagaatgtgattaatttttattaataaattaattgcaaaaagccaatgaactgccagtgtcagcaacataaggaacatctgcatcctcataggctcttccacatagtacgtctcacctccaccaggtgctcataagactgggggcagggcaagacatcagagaaagcttccaactacaaaacacaaagcaccatctggcctcccctttaaggaacaaaagccttcaattgctggaggagggacaccaaatcctgttgccccagggtacaggtgaggaaccagtacagatgggggaaagaaaaaagaaaaaaaaaaacctccatcctgggggaggactgaaaaaccaccctgggtcaagaccattagtggtcccctactgctggggcagggccaggaccacacaagacccactaaaggcacaagacagagctcagctgccatgccacataagggacagggctaccaagaaagcgccatgtgcaacatccgtataagactggggctggaccagaatcaaagaggaacaaccctgctcccacccaccaggttaggatgcaccaaataacaaccaacaaaagcttgtgcaacttggggaggtgcaagaatatggaaagaaactttctctgaggcccaggtgcagagtggagggctatgctgatggtggagcaggaatactggggaaccacttcccaccataagcacaagataatttgaaaccagtggtgacctgaaggtaaccagagaaacaacaaaacctgaatccaactcaacttatgacaaggctgaccatcctgctcacccctcacctccagtaaaggaccagaagaggcatgcctgtttccaggtacaactactatttacctcagtttgtactgttctacttaatatatgcaacgttcagcattcaactcaaaattactagacacccccaactaaaaaaaaacacaaaaaacaatctactattgaaagataaagcaatcacagaaccagattagctcatcagcttagaggatctgaggctaatgagaacaggaatggagtttgaatacctgacaaatatattatctttgctttattcttagccactgacaactaagacatcatggttgaagatcttgcaaatccattccactgacactggactatcttcatatatattatgtcatacactcattgacttcattcttataaaactagagttaagtaaaatagtttttgcttaccaacaggaaatgtaggttaagaagaaattaggtgcctcccgctgttcatgtactaacaggtgtaaagcaagtcaaccttctaacttacataggcttatatttcacttaagctaaattatccttctgttttcatatggacagaaaagctcttaatttaaagtacagtgctctttctgttctgatataccatttatactcctgaataaaacaacttcttgatggcacactgatatattacctatcactctgttgaggcagtctgcagaaatgttgagaagaatcttctctatcagctttgattctacatggatgtaaacattatgtcttccatcaacggcagtcattaacgctggcctacagaagagtaaacaacacacgaccttcaaaaagattttcaaataaaagaaatgcttaaatgaaaaataattccaaaaagcacttggtttttatgcaggattaattttaatgcttaaaacaactctaggatgttctgtgacatcctagaaggaaaaaaaggtttttttttccccaagagcttcaaatgataaattactacattttatttattctatatccatttttaaatttcagatactaatataaaaatatattaaactgttttataaattatttttagaaatgaaaataaaaataataatcacatatttcacaatcacaatttcaagttacttttttcaactgaattctttcctatcagaaataaactgttttgcatatcaataaaactggattaacaattttcagtgcatcctacatcttaatgctatgtagctgataaaaagaatgaagaacatttgcaagtgctattagggaaggagcaccaggatagactctagggaacaacaatatgaacaatattcttctgtccacatgcttctaaagaaagggatacacatgtgctgggatgaacataataaatcactggaaggacatacaaaaaaccttctcaccagcatggaagcagcactggtgggagagggttggatggtgaaggagactttcactctttgttttataacctcctatgtagtgtgcattttaaccatggcatgtggtacctattttataactacattgatttttaaaaaataaattgagaacagaattcagaaacaggctcattagcgggggaatttaatgtaacagagctaaaacataactactgattttccccctaaaaacccacttccccctttattcacacgatgactctatgttccttcctcttttcactctacactctttcctcagcctctctctccctccattatttatttcaacaaatacaaactgagtatctatcatggactgtggtaagtgctgggtacccactagtgaaaaagacaaatctggttccgtcactcaaggaacgtaaaactgtagagggataggaagaaattgggcatgcgcggtggctcatgcctgtaatcccagcgctttgggatgccaaggtgaggaggactgcttgaggccaggagtttgagaccagcctgggcaacacaacgagacctcatctctacaaaaagaagaagaaagaaaataagcttttcaacagtggtgccaagatgactaaacagggatggaacagtcttttcaaaaattcatgctgggacaactagatatccacatgccaaaaaataaaattataccccttccttatcccatatacaaaacttaactcaaagtagataataaacctaaatgtaggaggtaaaactactaaactcttagaagaaaatacgggagcaaatctccataaccttggcttagaaatgacacctttcttagatatgacccgaaagcacatgcaacaaaaagaaaaacggaataagaagtactggcaagaatatggggaaattacaaccctcatattgctgatgagaatgtaaaattgtgcagcaattttggaaaacagcctggtagttcctcaaaaggttaaacagacagttaccatatgacccagcaattccaccactcctagatatatacccaagagaaatgaacacacatatccacacaaaaacttgtacacaaatgttcacagcagcatcattcataatagccaaagagtagaaacaacccaattgtccatcaactgatgaatggataaataaaatgtggtatgtgcatacaataaaatattattttgcaataaaaaggaatgaagtagtgatacatgctacaacatggatggaccttgaaaacatcatgctaagtgaagccagtcacaaaagatcacatattatataatatttatataaaatatctagaacagacaaatctatagagacagaaagcagattcgtagttgccatgggttgaggggcatggggaatggagagtgactgctaatgagtatgaggctttgtaaagggctgggtaatgaaaatgtcctaactggttgtggtgatagctacacagcccttggaatatactacagccattgaattgtacatttcagaagattaatttgatggtatatgaattttaacttcagtaaaaatgttttttagaaaagacagtatgcaaatacaaattacagtaagcacacccaggctactataacagaaaataaagaagggtggttaggaaaggcctctctgatagagcagcatttaatctaagacatgaagaaaccagccttgtggagtcagacagagggaagacattcgagaacatcctaaggagaaaaatcaaaatgtctgaagaactgaaagaaggccacgtggctagagtgctggacgacaggggagtggcagcagatgagactgcagaggaaacaagcacaaggagatgactgatgggtgaagcaaagggtaatcacactgccaacgggtggagaataaaggggaggaggcaaggccaggaggagccccaccaagagactgctggtgtgctggtttgcgcaataggtagtagggactcagatgaggcctgagtgattccagaccagcaggcactgactttccattttggtttcacagtaattgaggttcagctaggggaaggtaaacagggatgccacatgccccgcagcatgtgggatatggtacataatgagaaactgtcctgagaaaaatgtcaacaatgcccctgctgagatacactggactaagatgttagcagtggagatggaaaaaagtggatgaatttgtgatatagttctgaatgaaaattcctaggacttgctaatagattagataggggaggtagggaagagaaaatgatgcaacgattgtgcccaggtttccagcctaaataattgggtagatggtgtgccattttccagaaagtataaaaacgaagagaactagatttgagtgtggttttaggaaaaacaagagtctattgtgggtatgtttaaatgtgagatggacatcaagcaaagaatttgatacctgactactggagcctggaggagaaaatcagggtgaagatgttaagtacaaatacgaaaacagctgtgatcatccaggcagaatgtacagaaagaataagaggaaggacacagacgagagctcaagattaaccccagcatttaaagagggggtagaaaaggctgagaaagaagggcctgagagacaggttagaaagcaaggaggaggctgtttcaagaaggaggaagtggactgacatgctgaatataactgagagcagttagagcgaggaaagaagtatccatgcctcaggcaacatcaaaagtgtaactttgacaaaagcagcttctgcagcatggtaggagtagaatggaataactgaagtgaaactgaagacataataggggagagagagtatatttacaactctttaacaaagtttggctgggtataaaacagaatagaaaaacgaagggataagagggagatgtaatgttaatggatgattttgtttgttttttaataagagaaatatgggactgtctttataggctagtaagaataatccattatgagaggtaatcactgaagattaagaaggaaaaacaaaacagggtgcagaaaccaaggaaaagttcaatcaccacagataaccttataagcctagcccagacttctcttgcaaattgcatttctttacatctaaccactttccaacttgttacctctcaggaactcaagctcaatatgatcaagatttctcccaaggttacttgttttaataaataatcttattgttcacccaactgtcaatgatttgcaatgtacctgtgctctctctttacctaccaatcactacatcttgcaaactattttccgaccattctcaaatctgtccacttctttttattcctaccgcttcctctctagtcaagccaccatcatctcccctccaaaataaggcaacagcctcttaccgcttctctgcactagcttcattctaatccactctccaacgcacagctaaactcacttctgatgaacagaatttgatagaagtgatgccacatgacttctgagtctaggtcacaaaaaggctggcttccacctggaactctctttcttgcctttcctgctctgaggaaatgagctgccactttgtgagaacattcaggcagcccgtggagacacccaagtgaagaggaactcaacttgtcagccatatgaatgagccactttggaaatgaatcctccagccccagtcaagccttcagatgactgcagccccagcctacaccttgattacaacctcttgagagacccaaacatttcctagtgctgcctaaataggagccttaattgtggtttgacctgctggggttttttgcttccagtacagaaaaataaatgtatttcttgtattccaaaaatgtaaatctgaatattctgtagaaacattgttaaaaatggtatttgagttttatgatagcttgaagagcaggaactatgctatctacatgttaatttaataaatgtctgtggcctcgtatgagactccattgcaatatctaatgttgcttccattggaaaatcagctccaagttacaaccaatgtaaaatatgatcaacccactcatagtttgggactgttgtgccacacaaatgttcattaagtgtttcttaaatggactaccaagcttcttgggcacaataagtctacttagatcaactagtataacatccacagtacacatgtgatatgtgaacatacgtggattcctaataaatatttgactgagtcttagaaaaataatcaatgagagttttctcttattcagtttgctgattgatttatatagatgattttggagtcacatacttgataacttgaagggagtttgttaatttcaatattttctttccaaggaaaccacataatctggactctaataatttaaaggcttttaggctgggcttggtggctcacacctgtaattccagcactttgggaggctgagacgggtggatcacctgaggtcaggagttcgagaccagcctgaccaacatggagaaaccctgtctctataaaaatacaaaattagccaggcgtggtggcacatgcctgtaatcccagctacttgggaggctgagacagaagaatcacttgaacctgggaggcagaggttgcgatgagctgagatcgcaccagtgcactccagcctgggcaacaagagcgaaactctgtctcaaaaaataaaaaaaaaaggcttttaaataaataaaaaataataattcttgccttaacatgaccattcaacattctagtaagacaacaaactagcactacatctttaatgtggtatagtttaggaagagatcttaaatacctcatactagttatgccataatcaggtgatactgatctgtgaagtccttctcttgaacagtcattttgtaaactaaagattcaaaggccctcctccccataaggaatagtattgagcagtatttttgtccaataaatgcttatattgaatagaaacatttggaatgatataaataagtcacctatacatacttttgaggggccttaactattaataaatcaatgttgtttgttacataccatgcattttttgttttgattttgagacagggtctcactctgttgcacaagctagagtgcagtggtgcaaacatagctcactgtaacaattgatctcctgggctcaaacaatcctcctgcctcagcctcccaagtagctgggactacaggcctatgtcaccatgcccagcttttttttttttttttggtagagatggggtttccctatgtttcccaggctggtcttgaacccctgggctcaagcgatccccccaccacggcctcccaaagtgctgggattacaggcatgagccaccacacccagcctaccatacatcttaattcaatcttcttttccacaaaagcaactttcacagtaatagcaaaattcattcacttatttataacaaacataatatctgtaaagagaaataaggtttacaaattaagcttctataacttttcttgaagtatgccatgataacatgtggaatatatctgaatttagtttttagataccgcaatatttagaaataatcataaggagcataaaacactgagtgctattttgtaaacacatgtaatttataaggtaaagagaaaaatgtctgagcttttgactacctattattcaaaaaacaatgtgtttttcactgagctgattagcagttttaccatacaacatttatttgctggctttaatttctaaggtaaaggtgggaaaacagcttaaatgtcttactagcttccacaacaactcagaggtgacatcatatgatacttttagcctttaaattctaattatatgttaaggtgggaaaatgagttatttatgagcatttagattttggttaaaaagtaaaccaaggaaaatgtttctttggtacagctgtttgaagacaataaaatctcccaattactgctttaagaaattcctatctttaagaaattcctataacgattcctgggtaatttttgctaccataaatagctatctatcactcagggaaaattttattctcttcgactagctctagttaattctttttagaaagtaagagtttacagactagtttttccagatctataataattattttccatcaaattggcttgcttagttgccttacctataatatattttcttcatagtaaatggcaagcagctaaaacattgtttgtagatcctgttctcatctgtttctagttccaatccacattttgcacagccagtatatatgatgttgggaagagaagaaaaaatactcttcagagaactgtgagcatttagagatatcttctgagctgctgtaagaggaaatgccagctctgaaatctgggctttaattagaaccactcctacaaacaacaaacagatatgttataaattattgggccaaaattataactttaatttacaaacatggctaattttatagttgatttacagtcacttgtagtaaaaggatacactgaggtcttgttcttcgtcttctttactattttcctagaatctaagggcagggaggtctggctgcaactgagagcaggtttacttggctaatttggctgaacatgtgatgtttccttccttccccatcctctggaatcaggcaaaataagttcaatacctcctttagaagaaatcccttcgaatacttgaaactagctaacatgccctctctccttgccctgtcttcttttaaactgatcatggtgaaaagccagataggggccgggcacagtggctcacacctgtaatcccagcactttgggaggccgacgcgggcagatcacgaggtcaggagatcgagaccatcctggctaacatggtgaaaccctgtctctactaaaaatacaaaaaattagccgggcgcggtggctggcgcctgtagtcccagctactcgggaggctgaggcaggagaatggcttgaacccaggaggcagagcttatagtgagccaagatcacaccactgcacaccggcctgggcgaaagagcgagactccgtctcaaaaaaaaaaaaaaaaaaagccaaataggaggtgaacttttcttcttctctctacgtaaaaatatcaatagcctgttctcttttaaacttttttccaactttccgctcaccattatcatctatatactctggctgtgggttataaaaagttctcatttattaatcgtttctcaggtgactcacaagaaacctcaagcatattcataattcactgctaatggctcatccattcaccagtaaacaaatactgaaagtctactatctcccagacattattttttcctaatttacttttgtcttactgtgtactggtgaggtctatgagttttcttgagcattattctccctttctccatagtcaatttaaaggcttctttaagccttaagccttcaaatttgttcttcttcatccacttagaagtaagaacactccaggtcaagaactaatcactctagtctcctactgttttctggttatctctttcagagtccagttaatgatgagtcttctgttcttaacttcatttgctttagtctttcaatgcccaaagacggtttcatcatctcttccaattgtgtcacatatccctacatgagttagcaggagtgcgtagcgatcgaatatgtaacaaactgtagaagattcaataccacatctttccaaagacatgttaaatcactacaaaattattattttttgttgttttgagacagtctcactctgtcgtccaggctagagtgcagtggtgcaatcttgactcactgcagtctcaacctccctgggcacaagtgatcctcccacctcagcttcctgagtagctgggactacaggcacacaccaccacacctggctaatttttgtatttttttgtggagatggggatttgccatgttgaccaggctggtctccaactcctgggctcaagtgatccactcttcttggcctcccagaatgctgggattacaggcttgagccaatgtgtctggcctaaaaaaatatgtaaaaaaaaaaatttcgatttttattttagattcagagggtagatgtgcaggtttgttacatgggcatatcatcacccaagtagtctcctgtagtaggcagagtacccaacagttagtttttcaacccttgctctcctccctccactcaaaaagtctttttttttttttttttttttttgagacagagtattgctctgtcacccagtctgcactgcagtggtgcaatctcggctcactgcaacctctgcctcctgcgttcaagcaattttcctgcctcagcctcccaagtagctgggactacaggcacccgacatcatgcctggctaatttttgtatttttagtagaggcagggtttcaccacgttggccaggctggtctcaaactcctgacctcaaatgatccacccacctcggcctcccaaagtgctggaattataggcatgagccaccctgcccagcctaaaaaattcgtaataattcaataattttaaaagaatgttcacataatcctatcattttgtaaatttacacaactcttgaaaagaattaaaaggtcacgctgaatgtggactttgctttcaagggggtcactccgctgagcactgaaattctgctggcggtaagatgaggtactgggtaagcgtcttcatttctttacaaggactcaggcctagcctcatccccctctggcttttgttgagcaagcagacccttctaggaaatgctcccatgctgatctctctttctccttttatttaactataaaataggttagggaaaagttgcttgtgttttcatattctctctccatttttgtcttaaaaacacatacactatgacagaaactatgaattcagccctcatagctgaacataaagagaatgaaaaaggctaaacaggcctctgtgaacaaagcctctgaaggactgattttaatggcacagttttggcatggcttgctaatgaggagcacacctccaggacttccaagaacatgcacaattcctggctgcgtcctcaaacaagtggggctatagcctgagaatctttcatcatcagcgtggtggcctcctattttgttgttgtccatgatgttatttatttttatttttaaacctaattctagacttcaatcccagcagataactgttttgtgtaagcagtaaataacagagttgacttctccatggcaccaaactaaacgtctctgcaaagtaaggtagcccctcaactgtgtctggcattccttcctgtggtgaccacctctatatgtctgtgaagttggagaagcagagcacgggaggggcacataaatataaaactggcttaggaacttacatgatgctataacattaccaagattttaccagttagtataaatctagagtcttttatgaccataggcaacttccatttttgaaaatagtatgaaatttttatagtataaaagcttataaattttctatcatctgtgtttaccttccagaaatattattaatttaaactatctgctggtattagtaaatgtttcagtgtagaactaagaataaggagttcttctctgagaatgaaatctctgtattcaattaaaagttgggttttttgagaggtattgtctttgttttctgcctgtattctccttagcatagttttatgatataacaatgctaacccttcaatcatatattggaaaacatatttacacatatatgtgaattaacccaactagtaacattttaatctggcatttggccaagataaagtaaggatctgaatttctgctcccacttgtcatataataaaaaataggtatttgctctttgtccctggttcctagcacatagttcctaaaactactggaatctagttcagatatttgcaaagatttatatttcacttttatatagacttatacatttttaccacaagtggtagcctttttgcttatattaaaactagcagtgggctgggtgtggtggctcatgcctgtaattccagcactttgggagtccaaggcaagaggatcacttgagtccaggagtttgagaccagactgggcaacatagggagactctgtctctgccaaaataataaataaataaatagctgggtgtggtggcatgcactgatggtatgcactagccttcccttccctcctcagctacgcgaaaggctgagcggggagaatcacttaaacctgagaggtggagactgcagtgagctgtgttcacaccactgtattccagcctgagcaacagagcaagactctgtttcaaaagaaataaaaatagcagaatttatgtatataaaaatcttacctgaacacttatcctctaggtgggttgctaagtctgatatcttcacaaaggagggtgcacttttttgaaattttgctttaaatgtaattgcccttatatcatcatcaaacaagcactcacaggatgaccaaggcgttgtatgcaattctaggttttctagtgtgtaattgcgctgaacaaaaagatatttaaattcccaaatataaccttaaacaaaaacagtaaaaacaaaagtcaccaaaaaggaaaaaaaatctaggcttagtatcagattaaatagattgatctgattaagtcagttgaatactaatcttttatcactaaagaatttgggtaaacagagacaaaatatgaatggtgcattaagacaacagaagcatgctagagattattattattattttttttttccaagacagagtctcgctctgttgcccaggctggagagcagtggtgtgatctcggctcactgaaacctccacctcccaggttcaagtgattctcctgcctcggcctcctgagtagctgggattacaggtgcgtgccaccactcccggctaatttttgtatttttagtagagacagggtttcgccatgttggtcaggctggtcttgaactcctgacctcatgatccgcccacctcggcctcccacagtgctgggattacaggcataagcctccgcgccgggccaccagagataattttaataaaatattttctaaagattccttgccctcctgaacggtcatcatttataataaccaactgctttctgtaaagaaaattctcatgtatctatctataggcaaagttttgttttgttttgttaaagaaaggacactgaaatgaacccaagtctaatatttcactcatatttcaatactttagttatcttagttaacttttctagaacaaaaagcatttagacacaatagtacttatttttaactctcagtaacaatttttttttttttttgagacggagtctcgctctgttgcccaggctggagcacagtggcgcaatctcggctcactgcaagctccacgtcccgggttcaagccattctcctgcctcagcctccggagtagctgggactacaggcgcctgccaccacgcccggctaattttttttgcatttttagtagagacggggtttcactgtgttagccaggatggtctccatctcctgacctcgtgatccgcccgcctcggcttcccaaagtgctgggattacaggcgggagccaccgcgccggccacaattctaatacttaaagccacagtaacacagaccttgttactgttatattctctattagtaaattcaacttatctgtattatcatattctgtattagtaaattcaacttcaaaactataataaaacaaaagagggtttcttagcactcatttttctgataacatcagctgtctttttagtttctcacttcaggccataaatctaatttactacacctgctcatctccttagtttctttcactaaagatttttttttttttttggtggaaaatcatcaaacatctcagtaaatctgtaaagacagaacatcactagctagaactaaagcatatattccaagttactgcttaaaaccaatcactaaaatagctttcttgtcttattacaaaatacctgattagaaaagtaagctaagagaagccaagtaaataaacatatagcagccataatctcaacaccctaaataagcagttaacattttagcggacaaccagttgtttgggattttatttattgggattgacttaataagtcaaatatagttttatatgtatgtattattctacattgcttttaaatattacataatatgccattgtccagatacaccaaaatcttaaaaattattacagcaaacctctattttgagggactctggttgttttttatttttcacaattatacatgataccatgataaacccattttcagctacatctttatacatagttatgataagttcctagagctaaaattattgggctaaaagtacccccaatttgttcatattaattgtcagttatcctcaagaaaggttctgccagtttgcatttccaatagctgatgacagtagctgttttcccatatcttctcaatcaatttcttaaaagaaaaataatctatcatcattactttgtgtgttttcaattacttgtaagaacaatttttccatatatttattggccatttttatttcttctttggggacttgcctactcatatcctttccccatttaactctatagatatgtgtcttttgcttactgcattattgtctgacaatgtaattttttttctgttttttttttgttgcctttcaattttgtacatggtggtttttatgtataatagtttttgttcctggattttatttaccctaccaacctttgcattacaaataattttgcctatattttcttctactattcattgtttcattatttttgtatttgaatctctaatgtatctgaaatttatattggcacaaatataaagtataaatttaattctattttttctcacattgttagctagattttccaaacattaactattcttttattttaaaaagcataaggttttaattttatttttaattataaaataaaatacatttattgtgaaatatttaaacagtaaagatgagggaggtaacaggtgaaacaagactgaccatgttttaataagctggctaataggtaccgaagttcattatgctggccgggtgcggtggctggctcatgcctataatcccagcactttgggaggctgaggcgggtgaatcacctgagatcaggagttcgagaccagcctggccaacatggtgaaacctcgtctctactaaaaatacaaaaataagctgggcatgatggcacatgcctgtaattccagttacttgggaggctgaggcaggagaataacttgaacccaggaggtggaggttgcagtgagcagagatcatgccactacattccagcctgggtgacaagaatgaaactctgtctcaaacaaacaaaaaaaaaaagtgccttatgcttagtattctctctacttttgtatatgcttgaaggcttttataataaaagtttttaaaagtaaatgcagatgctcacacacatatgaaattcaaactaaaggtataaagaaaaaaattaaagcacatataatactactatacagaaataactacggctagcattttgctatacatgcatatttccaggttttcaaatgcacatatgtacttatagatacatttttattaaaatgagatactatcatatataaagggttttcttgaaaatttttgtgtattaacttatataaacataaaaatatttattatatgataacataatatattttctatacatgaagttttacaatccaattttttttattttttatttttttttaagatgagaacttggactcctgggctcaagcaatccacccacctcagcctcccaaggtactgggttaacaggagtgagccaccacacctggcctataatctactttttaaactaaataatacattacatatatctttctaagctaatgaacatacacatttttggtagtgaatatctttatgtattcacccagatcacaaatgattcccttaactgttttcccatccactgaaataagctcaagctctcatatttgtattgcgtgaccctgtcttcctgatcacagttttttgaatcaaatttactctgggcaatcagattctctttgctgggaatttggaaatggggttggtctcttgaaaagaaaagtaaaatcaggaaaatagaattacttaagtaatccttcaaaattggtatttttatcttaaaaagactgatgtgaggtattgaagtagatgttaaaactttaaaatgatggttacaaataaggggggctggatgaatgaatgtacaaagaacaacaacatcttaattcctggattcatacgttttcaatactaacctaaacaccatagagtcacctagagacaactgtaatttctcttctattaaccaaaaaactattaattttaaaagaatattcacattaaacatggagcaatctgctctgttacagctccactatacctgtgacctacattcttgtgtagcatgcactagactcatgttctcagccaggctatggtggtcaatgatcatagttagtctatcactgatacatgtttgtcagcttgctcaaccaaacatctgtccctgtttgatcttaacataaaagtccaaagttagacttatctcaaatcctagtcatagctattaatgattaagagagacaatgtgatagatcctatctacaaataactatttggaaggcagaagtttggagagacattaactctttcaggtaaaaaataataatatactgaatcaatctctaaattaatttagcagggaaaaataactcataagccacaaatgaaactgtctttgattgttacaactaaaggatctcacaagagcaaagggaagacactatactattttaatgaaacatcaattccatttaattcaatataccagaaataatttatgctttaaagaaaaatgtaatcatgggtcatattttaacactgaacattctagggatggctaacagtgcatgcttttaaaacaactataataaaaatatgaaactgtaatttattgaacattaattgtgacttgaaagagttaaggtaactcccttgacatctgccttataatcatagcatttatttatcagagtactctggctgaaaaaaaaattgtagaagcttctccagaattaaatgtttaaagaacattatttgaaggaggtaagatcttcactaaaaaggtaaagtagtatatctgggaataaatttaagcctttatttcaccaccattaattaatgaagacttattagataaatgaattgctacaagaggtacaaaattttaacagaagaaatttgcagaagaatattcaatcatgatcacttgtatttcaaatgctgtctcgtctcttaagattttctccatcttgggctcataaacattaatcatttaccgaaatataaataggttaaatgctttttggtgtatttaccttttttcctttgaagttgagggtaccaggctgctccaggaccccataatacaagcgcataatgttgatcttgggcctgttccactgttaacataacttttttctgcttctgtcctctataactgtatactgcctctggaaaaggaaaatgagtatcttagttggcattactctatcacacgtgataccatactttaatagctgatgatacatatatagtgataaccaaatggtacactaagatggtcttgtatcttaattttttcataatctaaaattaaggaggcagtcaaaatgtttacctgtcagtataggaaatcaacaactcttagtactgcgtggactaacacatcaggttgaaggtgctccaattctacaaagtctatactgttcaccctctgaggctgtctcggaggaagatctctgaggtaggaatgttttgaggacacatatgccagtaagtcttgaagtacaacgtcactaactacactggaatctaaggaaaaaaaacatgcatacagacaaaagatggcaacattacatttttcttgacaaataatattttttagaactgtattttatgttgtaaagtatgattagatataaaatatagttttgttttctctaaaacatgtacaatagctaagtcttgaatcagtttagatgtaaaaataaacttgatatttttaatcaatggaaatggaattatttactatccccaaaaaacttgtgctgttcccatacttctttactttgttaataatatcattttctatcaattaaccaaacacaaaatttctgttcttttttgactccaccaccctgtaacagccaattggttccccaatccctggagtctgatttgatcctgctttcccaactatcctagcctctgccgttcttcctcaagccccttctgaaacaggctcagagccacctcactggttctctccctgagtgtgccttactctttccacacgaggcctccgtcctcaccaatttccagctgcaaggctgtcttcttgtcctacccaataccacatagaatgatgaccactatagattcacagtgctgcttttttccctgagctcagagagcttttaagcatgtgctacattgtaatatttttcaagtgttggattggttatttaattcttcagttactatgtcttttaaatgtttttctctttcctgtctcatttttttttctcactttttattaaggtatagtttctgtacaataacatgcatatattttaaatgtacaggctgatgagttttgctgattaaattttaatttctctgaaggtaagagaagtatgcttgagtacgtgattgattgctgaccaaaataagatattggcaataaacacttaagtactttttagaaagcagacttcataaactgatttgtgattcttctttccttcctttagacagtaaaagaaaagggatgtaacaggtgaaacaagactgaccatgttttaataagctggctaataggtacttaagttcattatgctttgtattctctacttttgtatatgtttgaaggcttttacaataaaagtttttaaaagtaaatgcagatgctcacacacacataaaattcaaactaaagttacaaagaaaaaattaaaaccacacgtaatactaccagactgaattcttctttcacagtatttccagcaaatctggaatcagaagagttgtattcaaattctggttttgtcaataatgagctctgtgaacttgtacataacttctctgggcttcgtttttcatgaacaagatagagcttttggggaacaaaaacatctctgacatcaaattatatatttgtccctgattcataaaaatttacatggaaacacatggttatttagattccaaaaaaagtctacctcatggaaacactgtgttgatctttgacttatatatttaataatattcaagataaatttatattcctgtcacattatcagaactaggtttgtaaaacatgtaacacctcactataaagatgaaagaacagaagtcttttcttttcaacttttactttagattcgggtgtacatgtgcaggtctgttacctgggaatactgcgtgatactgaactttggggtacaagtgatcctgtcacccaggtactgagcacagtacccaacaggtagtttttcaaccctctccctctagtagtccccagtgtgtattgttgtcacctctatgtccatgagtagccagtgtttagctcccacttataagtgagaatacacgttatttggtttcctgttcctccctcaattcacttaggataattgcttccaactgcatctgtgttgctgcaatttatttatttatttatttatttttttgagacaaggtgtcactctgttgcccaggctggaatgcagtggcacaatctcagctcactgtaaactccacctcctgggctcaggtgatcctcccacttcagcctcccaaatagctggggccacaggtgtgcaccaccacacctagctaatttttttgtattttttgtagagacagggttttgccaccttgcccaggctggtctcaaactcctggactcaagcaatctgcctgcctcagcctgtcaaagtgtgggaattacaggcatgagccaccgcaccatcctgatttcattcctttttatggctgtgtagaattccatggtgtatatgtaccacattttctttattcaatcctccactgatggccacctaggttgattgcatgactttgctactgtgaatagtgctacaatgaatattcaagtgcttatgtctttttggtagaacaatttgttttcttttggatatatacctagtaatgggattgctgggtcaaatcatagttcagttttaacttctttgagaaaaccccaaactgttttcaacagcggctgaactaatttacattcccaccaacagtgtacgagcatttccttttctacacagcctaccaacatctgtcgttttttgactttttaataatagttgttctggggctgggagtggtggctcacacatgtaattccagcactttgggaggctaagacaagaggatcgcttgagctcaggaattcaaggccagcttgggcaacatgacaaaacctggtctctacaaaaaatacaaaaattagctgggcatgggggcatgcacctgtagtcccagctattcaggaggctgaggtagaagaatctcttgagcctgggagattgaggctgcagtgagctatgatcaggccactgcactccagcctgggtaacagagtgagatcctgtctctaaaaaataaattttaaaaaagtattattaggtcccacttttcaatttttggttttgttgcaattgctcgagggcttcatcataattatttcccagaagtcctttccaaaaacacaatatattgatcagaaataagaatcctctcatgagttgtaaccacttgcaaaatcaaaaccaaattggtaaaatgagtaaccaaattggtttactcttttttttgtttttttttgtttttttgaggtttgcagctattttatttacaagtatacatttaacacaatgaaataaacactgatatattgaagcctagttaatagtagtgtaacaatatgcatcattttgatgattacattattttaaacaacaaactacactgaaaaattaatgccgataaaattcttggtcataatattaagaaacacaatatataaattgaaaatatgattgcttaaaatttgaaaatggaagtgaactcatttggacagactcagagttaacataatctgaagggaggggagctctgacccaaatgatatctttcaggttaacagaagaaaaaagaagcatagtttatcttcaaggagaacgggcagtttgcttcttcagctagaatatattcccagtgtcctcgggctttgcagcagaatcacatcaccgagcatgaagacttgccttgtgaagctgcccccgtccattttttctgcctccaaaatcatccttcgaaaaacatcaacagcagtctgattttctttagcagaagattccaaaaaagctgcattccaagattctgccaaagctttcccttcttcataactgatcaccctttccatatgcaggtctttcttatttccaaccaacataataggtatttgtactttccccaccatatccaacaatttgccatggataactttaatcacttcaaaacttttgattgatgtaacagaatacacaagaatatagccattaatatctatggagtatgtctgaggaaagatagaatattcatcttgcccggctgtgtctacaagttaaagatgatattcttgtccatttactgtgatcaactttgtaaaagtgttttctatggttggatcgtaggagtccacaaattggccttcaacaaattgaatcgtcaatgaggatttccccacagaccggtagcccaggatcgcgatcttccgggactttgactgcggcatcttggcggcctcctcagccccggcccaaccacatcaaccgcggcggcggcggctcctgctgctgtgatcggcggcggccgcgccgggagagagcggcatacagagcaggggcggcggcgggcgcggctgcctctcgctcgctagctcgcgcgctcccaaccgcccggaaccgaccgcgcggcggcgcccctccccccccacaacacgcccacgtgaccggccggcgtcagcaccgcccctcttcgcgccgtggcccgccgcctccgccccccgaaatacgcggggggtgcgtcggggcgacgttttactttaaaggcaaaaaaaggggacgccgcgatgcccccagaaaagtcacgactgaaactcgctgcgtcatgacccggtttactctttcagaaggaaaacaactgcaatattctcaaaatgtccactggtagccatttccctacatcaataaaaaactttagaatatactttatttagctactaacttgtaaaaaataaagcaccataaattcctgtgtatgtgtaaaaacaaagattgtgaagtaacttctaaagattatctaattagttcaagatttttcacatcattctacaaaaacctgaaactctctaggggattcatagaatattctccatccagaattttgtcataagagttttatgaaattactgaactattacttgaatctagatcatccttaaaaccagagatatctacatttcccaaatctcttgcaaagcatttgcataccatgttattttcattatttcaaaacattccttccccttctattctatcaacatctacaagatatgctgaattttacttagaagccatttagctatcattcatacacacacactttccaaaatgtaacaccttcaaatatacataataaaagactaaacttgtatcttttacagaaatctcaaaattaaaatttaactgacttcaactgggcaaaaccacaccatctcagttactataggttcatactaagtcttgatagctgatagggtaaattattcttccctgcttttcttcttaaaatgccctgctgttttcaaccacttactcttctacataaatatcatataatcttatcaaattacatgaaaatcttattggtctttaactctttgcctcaagagatcctcctaccttggcctcccaaagtgctggcattacaggcatgagccactgcgcccttgaaatcttacgaggatttttatggaacatgcactgaatttacaaatcaacttgaaaagaactgaaatcttcacaatgttaaatcttccaattaatgaataaagtatgtttatttcattctttgttagtttttcttcatttaaaaatttttccttttttaggtcttgcacatactttgttacatttattactattagtacaaaataatattgttgtcaatgacagcttcctttgttattgttagtcgctctactctagaaatgtgattgacttttgtatgttaatcttatatccagctactttgctaaattttcacattatttctgataatttgtttgtagttttcagagggaaaaggtatgtaaaccatctataataatggcagttttatttctacctttccaatctttacatatctatttttccatgtttattgcactggttaataactctaatatggtgttgaagaaaagtagtaatagtagtatcctagtcatattcctgaattttaaaaggaatgcttctaatatttttccaattaggatgataattgttctgggttttctaaagacactctttatgaagttaaggaaaattttattctattcctaatgaacaggtgttgaattttatcaaaagctttctttgtacctattgagatgatcgtatacagctcttttaaaaactctgttttgaactaatgtaagacttacaaaaaagttgcaaaaatagtacagagttcccttatattcctcactatgtcgactaatgtgggcatctcacatattataaattatcttaaacaggaaactaacgttaattaaatattgttaattaaaatgtatatgttatttaaattttaccaattctcctattaatatgctttttctatgtaggatttcatccaagatcccacctcacatttagttgttatttctctttggtctcctctagtctataagagtttctcagtcttttctttttcattaccttgacacttatgaagaatcctgatcatttatttagtagaacgtccttccctttgggtttctccagtgttttatgattggaatgaagttatgcatttttggcaattccacaaaaaatatggtggatccttctcaatggataatatcaaagaatttatgataccatacatcttattactggtgatatttaccccaatcactcagttaacttggtgtctgaagagttttcttataaatttattattttccctctagtaagctggtatcctggggagatactttgagactatgcaatgctctctctcctcagactttcacctactaattttagcatctatcagtgcatttgtgtcggtgcagtatttattattgtgatctctgcctgatggtaattctctatttttgtgttttgtatttttttttttttcttgagacagagtctcactctgttgcccaggctgaagtgcagtggcatgatcacggctcactgcagcctcaacctcctgggatcaatcaatcctcccacctcagcctcccgaatagctgggaccataggggcacacctccaaacctggttaatttttctattttttgtagagacagggttttgccatgttgcccaggctggtctcgaactcctgggctcaagccacccacctgcctcagcctcccaaagtgctgggattataggcatgaaccactgagcatggccagtaattctctatttttttttcttttctctcagatttattaattggaattccattggaaggaagagctctctcttcccctctggttagttaatgaaataaatatgtctttatatcagtaaggatttgtaaagattttaatctatgggttctaatccaatactatcattattttcttactcaaattgcttcagctttagccagtaggtgttccttcaggttggctcttgcattatttcaacatgtcttgtctggcaccactagacttccaggcttatcctgaatttgccctgacccagtcctgtaatcaaccacttttagcagagctggttcctttcattagagaactatgttggccaggcacaatggctcacacctgtaatcccagcattttgggaggccaagatgggtggactgctgaagcccaggagtccgagaccagccagagcaacatggtgaaatccagtctctacaagaaatacaaaaattagccaggcgtggtagtgcacacctatggtgccggctacttggaaggctgaagtgggaggctggcttgagcccaggaggcggaagttggagtaagccgagatcgcaccactgtactctagcctgggcaacagagccagaccctgtctcaaaaaaagagaggccgggcacggtggctcacacgtgcaatctcagcactttgggaggccaaagtgggcagatcatttgaggtcaggagttcaagaccagcctggccaacatggtgaaaccccatctctactaaaaatacaaaaattatctgggcgtggtggcacgtacctgtagtcccagctacttgggaggctgaagcaggagaattgctagaacccaggaggcagaggttgcagtgagccaagatcacgccactgcactccagactgggtgacagaacaagagtccatctcaaaaaaaaaaaaaaagaaaagaaaagaaaatgtttacagacgaagatctgggcaccaggtatgctcattattactggggagtaactgcatctgtgctgtgctcgctcaatggacagaactaggagatgtttatgtatgtgtactatcccacccatatacacatgcctatatttctgtatccatttatctatattaaaaatcctcagtttataacaatacctctggttcgttttaaccttcccttgtttataatttctttctccaacagtgagaaatccagctttccttatctacaatctatgtactcatttgttcattctagtatgtacataaggttattgctaagccattcccctttgagaaacatatttctaactagattgcagcatttatgtacagtcctttctgtcattagccttatagaatccagtcaatatactcttttccacagctacttaggtttgttcttttcttccccacccccttctgtgtagttattttattcatttgtaacaatattgggttcatttgtaacaataatacattcatttgttagtgtcacttcctcctgacccctgctatcctgttcccattccccactttcttccacccctctcctacgtgccccctgtaggtgaccaatctctttagtttctggtttatccttcctgcattttctttccacaaataaacagaggtattttcttattcctccaatccttcttacaggaaggacagcatactacatacagttttggggggtttatgttttcacataacagtatgtcctgggaatcactccatatcagttcgtagagatctttttcattctttttgtacagctgcatagtacatagtgttccactatgtgaatgtaccataacttagtgaatcattctcctatatattttgcaattataaacaatactgcaatgaataaccttgtgatatgtattttcatattgttggagatgtagcttcagggtagattcctagaagtgggattgctaggttgaaagctaagtacatatgtaattttgttagatattgccaaatatcccttcaaaagggttgtagcaatttgcattcctaccaccaatgtataagagggcacattacctcacagttgcgccaacagaatgtgctttttttttttttaattttgccaatctgataggtgagaaatggtatctccatgtagttttaatttgaatttctctaataagttatatttgatagccatttttatatctttttttgaaaattgactgttcatctctttttcacattttcccttttgccaggctagagtgcagtggcatgaatacagctcactgcagcctcgacctcctgggctcaaacaatcctcctgcctcagcctcctatgtagctgggaccataggcatgcaccaccacacctggctaattttttgactttttgtagagacagggtctcactatgttgcccaggctggactcaaactcctgagctcaagtgattctcccacctcagctttccaaaatgctatgattaccagtgtgaacaaccacacccagactttgtcactcaaggtttaaaagttctttatatattagggatattagccttttgttgtatgttacaaatattttctccaagtttgtcagttgtcttttgactttgtttatagtgttttggttatgcaaaatttatttttctacagtaaaatgtatcagtttatcttctactgcccctggattctgagtaatattaagaaaaagcctttccctacaccaagattacagaggattcattcaggtttccttcttgttgttgcatgattttattttttacatttagactattaatccatatggtgtttattactgtttgttgtgagatacgtgtccaattttcccttttttccaaatggctacccagttgtctcagcaccatttattaagaagttagcttttatctcactgattccagatactatctttgtcatatattaaattgctatatgtaggtgggtctaattctaatcttcttactctattccactggtctacttgtctattcatgcatcagtacttcactgttttaattacagaggctttatagtatgttttaacatctggtaaagctagttcccctcctctgtagttttcctttgtcagtcttttcctagctattcttgcatgtctgttttcccatatgagctttagtatcaacttttatatgccacaacacatatattttcattggaactacattgaatttacatattaacttaggaagaactgacatcattataatgttgagtcatcctatccaagaacaggaaatgtctttccatttattcatgtcttcatttctttctggagtgtttaaattttttcctcatataggctttgcatatttcttgttaactgtattttgaactatcttctttattactatagtaaatgagtttttcactatcattatgccctctgtttgttatttgtgtatattgtctaattactattattattatttttttttgagacagggccttgctctgttgcccaggctggagtacagtggtgcaatcacagctcactgcaacctcatcccccagcctgggctcaagcaatccttttacctcagcctcccaaacagctgggaccacaggtgtgtgccaccacacccagcatttttttctttttctttttcttttcctttttcttttttgtagcccaggctggtcttgaattcctgggctcaagctgtccacccactttcatctcccaaagggctagaattacagacgcaaaccactgcactcagcctaatgatattttttaacattaattttgcatcctgttatatcattgaattatcttattatttaaatttgttttaactttgattccctggagttttcaggtatgttatcagagcatttgtaaatagagataattttcattcttctttatccattcaaatgttcaaatgcctcttctttctttttttttttttttttttttttggagacagaatctcgctctgtccctcaggctgcagtgcagtgtacaggtgctcactgcaacctccacctcctaggttcaggcaattctcatgcctcagcctcctgagtagctgggaccacaggcatgcaccaccacacctggctaatttttcatctttttagtacagacagggttttgctatgttggccaggctggtcccaaactcctggcctcaagagatccgcccaccttggcctctcaaagtgctgggattacaggcgtgagccaccgcaccagaccagatgcctcttcttgtctaagtgcgttagctgataattctagtataagatgaatagttgcagagatagtggacatccttatctttttcctggttttaatgacaatgcctcgagtgcttttctattaaataagacattggcattaggactaagtatctattttattgatatagtattaatcatattataatgctgtattgatgctatatttatttatttaagaaaaaaattttttttgagacaaggtctgactctggtcacccaggcagaagtgctgtggtacaatcatggctcactgcagcctcaactttctttcccacttaagcctccccagtagctgtaactacaggtgtgcaccactacacctggctaatttttccatatttttagtagagatgaggtttcaccatatcatccaggctggtgtcgagctcctgggcccaagtaatcctcctgcctcagccacccagagtgctgggattacaggcataagccactgtgccaggctgatactatatttattgatactgaaagggaaagtatcctagtatattactagttaacagtattatacaaatgttgatttcctgttgttgatattgtactaaagttatataagatatcaccattgggagaagctagaagaagagttcatgggactttatgtattatttttgcaatcccctgtgattctataattatacagataatatttattttaaaaacttttaaatttgaaatattatctgtatgctaataactctaaaatttgcctcttaattttaaacctgtcttctgagtcctgaactttgtttccagttcttatatgacatctccacttgaatatctcaaagatatctaaaacttaacatgccttgaaacatagcccttttccccacaaaccagttccctctcagtctttcacaataaaggctacctagttacttaaaccagtaatccagtagcagtagattgtccctcttccctgatccccagacccacatcatcagaaaatcctattaactctatttacaaatatatctcggctctttagctccactggcctcccattatctctcaactgcagctattgtaacaacttcctaaccctgattctactccatgatcaatccttctcaactagaaccatggcattctgtatcttaaccctttgttagtttccttcatagcactcattatcacctgcaaatattttacttatatgtctgtttcattcattttttttggtctgtcttccacatgagaacataagctccaggaggacaggcaccattgtacccccagtgtacagtaaacacagtgcctgaaacaatgtcaacacataataaatatatattggatagatgaagaactctatttgagttgtctatgaaatatgtcagagttggttttctgctgatgggccaccctagtatataatgaaaccttgcccatcccaaacacagttcttgttattctaattgttgctcttcccttctacttgctctgcctttctttaagaattcaaagattggaattccatgctctatcttccatatacatcctataactttcctattattccagttatcttcttgtataatcagtatatttctctagctattttcttgtatgatacttcagcattttatcaaatatattttgctagcttattatttctccctctaatattactatgttactactacattatgtgcaggttcaacatcttatattcattttctcacttaatcttcataacaaccctataaggtatatatgtatttttatctccatttcacagaaaaggagataaaggtatagtgaagtgaaataacttgcctaaagacaaagactggaagtaagagggccaggattcaaatcctggtctatctgagtccagtgaccaaaaccacaagtttatactgtttcccttactttgttttctttcttttttttatgtcattttatttcctagtggaggagatagctgctagtttcctcattaaacagcttcttttaaagaagagaaaactggacattaaagaagaaagatagcttttcttagcagtggtagacaggagaataaggattcaaaccacagctgtctgaatacgagaccaatacatttttattacctcaaggattcttaatcagaggctcagaagttccacagaagaacttcagaggtccacggaatgctttagaattataagcaaaattttgtgcctatctacataagtccagttttctggagaaatggtctatagattctcaaagaggtctctgactccctaaaaggtgaagaaccaccactatactgacagcctaagaaaacgaaacatgatacccaatacttcttaaaataaatgtgatttacaatgtacaagttcatttcttaaaattctattttcattcttactaatgaaaagaaaccaatactctccaactgtttagaaaacattttgtaaaagaaccattttaactctaatctttcctagtatgtttttatactttaaacactaatacattacttcatttaaaatgtgccttacattcttcaggctgaatagatgaataactcccaagatttaataactgactgctaaatgttgattgtagtactgtctcaccaatccattggtcctcatgaataacaacatctagagagagaaaaaaacattctgatcatgccataaattccttcacaatgtggttaacctactagtcacagcaaaatattatgcatgcctcccatataccaagcaactagagatcaaataggttaaataacctgcctaagggcacgaaatgacaaaacagcaaatctaaaatctaaatctaggtaaattaacaaaattgcttctttatattcaaatgatagcagtatggaagtccactgctctatataaaaaaggtttaatagcttttatttacataaggaaaatgttatcatgtatatttctgatacatcaaaaataattttttttaggaccagaaggcaaagtagtggttccaaagccgtagtgcctaggagagtaataatattcagtatgcactggtcccttctactataaatatatctgaatataaggcattcttaacatacttgattatttttccctaaatagcacgataattatcttccacacaagttaaaagtgaaagactttggaggtagggaacattttccaactggaaagagagagctgtatatctaaggcggatagagtagaatcaggtagaactaaacataccaacaggtagaaacaattgtaggtagagcaaaacgtgtgagctgtaaagagaaagaggggaagggagctatctctaaggcaggatctaatcagcatacagtgtcagaggtataaacgtatattaacaatagtgaaataatttagagataataggaaagaaaaccaaggatgtataaattccaagtgattacttacagatttagattccagaccctttcctcagcttttgaaccttttatctacaactgcctaatggaaattcccacctggatattccattggctccccaaactcagcaatgtccaaatctgcttttcctttcatagcgcccaactcatttgttgatgctatgctgctaatcaagtaaactaaaatctgaagtcatcttgcctctcccttcccactccttgccaccagctcccacctacccctctgctgcttaaatgtgcccatgccccaccactactactgttttacattacacattcctttccctcccaacaggtgcttgtcccgcctgcaacccatttcttacaatgctaatgagtcattaatcagagcattaatgagttcaggcgagtgatatatcagagcattaatgagttcaggtgacttactaaaaaacagtggttccccactgcctagccaggaagagctagtacagcattcaagacttttcatgatccaacattcaggatgcatgttcttcagaaaaaaggaacagacaagaaatttcaaggagagcattctgaaagctaggactgtgaagcctatgttggattagtgacatagtaatcactagtggtgcatggaggggatgggtagcccgccctggcctcctggctccttcctaccctctcactgacatgccccagctcctagtccttattctgtttgtcctttaaacactgtggtttcccaatgttaagcctcccatcttcttctaattctagtcagtagtctcccttaggtaatccttatttttggcatctcttcattctattgctagaagttataatagcaaactgtctactgtgttggtattcaacaaggtctggaatacatctgttacttcaaatttttcagtatgggccgggcgcggtggctcgcgcctgtaatcccagaactttgggaggccaaggtgggcagatcacaaggtcaggagttcgagaccagcccggccaatatggtgaaaccctgcctctactaaaaatacaaaaattagtcaggcgtggtggcgggctcctgtagtcccagctacttgggaggccgaggcaggagaatcacttgaacccaggaggcagaggttgcagtgagcagagatcacgccactgcactccagcctgggcaacagagcaagactccatctcaaaaaaaaaaaaaaaaaaaaaggaagatttctgtttgggggtatatatcaataggtagtatgaactacccaagctatccaactaagttcactgactcattaggacaacagaaaagtgtagatttcttttttttcccaacatttccatctgttccacacaaaagaaacttattcagaattcggtgaactagatcctctttttcttaaaaagacaaaaaaaatctgattttttaaaaaaagttcatagaaatcatctaaatgtcttataataggaaaatggttaagtaaattgcattacagccaccagagagaatgttacctagtcgttaacaactatagagatgttaggaaaaaatacagagattgcagagttgagtttacacctacctaggaaaacggaaaaggcccctgagaggtccctgctgacattaattgcctcggtaaaatgaccatggtccaggatccagccctcttttacagtctgggaaacttaattttgttaacactccaaaactagatttcagctctgcaacataagctcatactaaatcaattaatgaaacaaattaaagaaaaaaaacatttttttttcatttacaataattgcccaaaaaaaaacagtatttcagcctgttctcatgctgtgggcagctctacaactagaaagccaaatcacaagcaaagaggtattcagcaagcactgaatcagaacagagggagttaggtgaattgaacctccaataatataatcacatataaataatattagctaatattgccagtgggatgtggctatgctaagcctgttcattacaattttgtgtttacctctttataaaagattgtactcggccgggcgcggtggctcacgcctgtaatcccagcactttgggaggccgaggcgggcggatcacgaggtgaggatatcgagaccatcctggctaacacagtgaaaccctgtctctactaaaaatacaaaaaaattagccgcgcgcggtggcaggcgcctgtagtcccagctattcgggaggctgaggcaggaaaatggcgtgaacccgggaggcagagcttgcagtgagcagacatcgcgccactgcactctagcctgggtgccagagccagactccgtctcaaaaaaaaaaaaaaagattgtacttgacaatcctacaggaacaccaaggtacattagctaaggttctcattcctcctgtaaactatttggtaggactatcaatattgcttcgaagttttctttttctaaataccgcctctgtatcacattctttctttagatattttattaagcttaatcaacttcctcctgctctaatacaccatgtgtcaattttaaatcaacaaagaacacgtaacacaatgttagatgtcttcggtgaaaacatattctggccaggcacggtggctcacacttgtaatcctagcattttgggagggcgaggtgggcggatcacctgaggacaggagttcgaaaccagcccggccaacatggtgaaaccccgtctctactaaaaatacaaaaattagccaggcatggtggcttgcacctgtaatctcagctactcaagaggctgaggcaggagaatcacctgcacccaggaggcggaggttgcagtgagtcaagattgtgccactgcgctccagcctgggtgacagagcaagactgtctcaaaaaaaaaaaaaaattaaatattctctctgggtgcagcggcatgcgtgcctgtagtcctggctacttgggagactgaggcaggaggctcacttgagcccaggagttcagagttgtagccgatcaggtgtttgcactaagcttgccatcaatatagtgacctcctgggagtggaggaccacaggttccctaaggaggggtgaactggtccaggttggaaacaagggcatgttaaaaataccatgggcacggtagctcacgcctgtaatcctagcactttgggaggctgcggcaggaggatcaattgagcccaggagttggagatcagactgggtaatgcagtgagatcctgtccttattaaacaaacaaacaaaaaattaaaaataacaattcaaaaattctcatgctgatcagtaatgggattgtgcccgtgagtacccactgcacttggcaacatagcaagactctgtctcttaaaaataaataaattaaaaattaaaaaaacaaaatgttctttatggttacaactatatagtaagagtataaattctggagtctaggagaaactatagctttgccacttcctagatgtatgacattggacaagttactttacttctctgggcttcagcttcctcaactgaaaagtggggataaaaatcagtaccttcctcatatacttgttgtaatgaaatatgcatgtaaaatctaaaacagggtctcacaaactaagctcccaataaatatgagcttctatgtgtgatatatacacacatgcacacacattttaaggagaacagagaaaataactggaaggcaacactctcgaactctattggtggttatatgaagttggtataataccagttttttcctttccatatttccaagtgtaattaatataattttgataataaaataaggcaacagaaatcaataactgttcccacagtaaaaacacaatgtgcacagcattattagacattaggtaaagaagcagaaaggtctaactctgttgcttgggctagagtgcagtggcccaatcaaagctcactgcagcctcaacctcctgggctcaagcaatcctctcatgtcagcctcctgggtagctgggactacaggcacgcaaaacttaatttattttttgtagagacgggttctgtgttgccaaggctggtctcaaattcctggcctcaagcaatcttcctgcctcagcctcccaaagtgctgggattacaagtgtgacccactccacctgactagggaaggcttattaaaggaggggataagtggaaagaaggggcagagctgagaaggatagaacagaggcccagaagtggcaatgggcaggagagtggacaatggaaaggagagcaatgcagatgcaataaagggatcaattatgctgagctcagaagaggcaaatgactaaagaaagagtcttcaaagactaagtgggagaaaacaaaaacaaacaaaacttagctttataaaataagctaccactataccataatgacctcacccgtgagtaaaattatatctccaagaaacactgtaaatgcccaaaatgctgcagtcctccacagaaaaaccttcttcttagtttctgattgatcacttactgtaactgttgctaaaggcactttagagccagaatttggtccgaattttatgtttatttccttcacatggcatggagatagcaccatgactaaacaattatacttctggcttttagaatcacagttttttattaatgatttttttaatactcttaaattcagacacatttctccgatccatttctacagcagaatctcctccattagaaatcaacttcattttcttagctacttgaaggactctagatagagcttcagactgggccactttatcttcagaggtacagcttcttttaatagcacttttgtggaaggtatttagttgggaacacagtattcctgagctacacaactcaatacgtatctcatttggtggcagttcatcttcagaactgaaaagttcttgagatcctgtatgttcttcaagacctttatcagagtttatgtgaatgcggctattttctgttttaggacaaacaggactaaaaagttcaagggaatatgcttggttttgtccactttcatatgcttctgtaaaaccatcaagctgaatcgaattctcttcaggtattcttatctccccgtaacttgcctttggttcagtctccatgtttacattccctttatttacaggactccgccttttatctttcttttgagctaaaaaaagcaacctggctggaggtaattatactgagaaattctttatcagttgatattttaaggtctgagaccttcttaactgctgcttcagaccttgacttatctactgagttcgaggaaaataatcccaaacgctggttttgtatttcatgatattctgttggcacacactctctttgtaccacttcaggccctatattaattttttcagtactacaaaccaaatccaacacagctgcacatttatggcccaactgaaacaaatttgtgttaaagttctgaccacatatatctggctgatgtttaggctgttcatctctaattttattttcactgagaagctttgatacttttcttcttcggttaaatgcggaactgtgcttttaaatccacatatttgcatattagagctagttatgccactcagtctagaggagtgaatcttctgggattctatattctgtgtttcagaaacagaacgtacaaagtcatctttcacatgaacatgtctattcatacagtttgctaagaaatgaccacaaagatctggagaaccaatagaatctgggacttcatagttttcaagatttttgtgctgtttttcatccttcagatataaagaatgttgactgtataaaagctgaatttttttccaggggtcagcaacagacattaaagaagctgtgtcttctgatactgtcattttcagtggagcaactggagcaccccaaaaaatgtggacttgagatcctccactcatgatttctgataaaaatgaaaaatccaaaattaatatattgtcagcatatttttgcatatggatattaacttaataatgtaccaaaagaaaatataactgagtcaaaaacataattaacataggtgatttttttgatatgccatttaattatataaattcataaatacacaagaaattattaaggagaaatcacaatattcacaaaaatttttcacctaaagactctctttaggccgggcgcagtggctcacacctgtaatcccagctctttgggaggccgaggcaggtggatcacgaggtcaggagatcgagaccatcctgcctaacagcgtgaaacgccgtctatactaaaaacaaaaaattagctgggcgtggtagcacatgcctgtagtcccagccacttgaaggctgaggcagaagaatcacttgaacccaggaggcggaggttgcagtgagcctagattgcaccactgcactctagcctgggcaacagagtgagactccatctcaaaaaaagactctctttaagggaaataaagctaagcacactcacatcaaacaagttaataggtttttagtatgtttgtttcatttgagatggagtcttgctctgttgcccaggctggactgcagtgttgccatctaggctcactgcaacgtccacctcccaggttcaaccaattctcctgcttcagccccctgattagctgggattacagtctgtgccaccatgcccggctaatttttgtacttttagtagagacggggtttcaccatgtcggccaggctggtctcaaactcctgacctcaagaaatccactcgcctctgcctttcaaagtgctgggattacaggcgtgagccaccgcgcctggcctgtttcttatgttgtaaaaacttgccccatttaaataacaagttagtaaagaatgggaaaagaggcatttgtttaactatattacagtcacctttaaattagtcattttggggcagagcacagtggttcacgcctgtaatcacagcactttgggaggccaagggggtggatcacttgaggtcaggagttcaagaccagccaggccaagatggcaaaaccccatctctactaaaaatacaaaaattagccggctgtgatggcccatgcctatagtctcagttactcgggagtctgaggcaagagaagcgcttgaacccaggaggaggaggttgcagtgagccaagatctcaccactgcactccagcctgggcgacaaagcgagactccatctcaaaaaaaaaaaaattactcatttttggccagccatggtggctcacaccggtaatcccagcactttgggaggccgaggtgggaggatcacttgagaccaggagtttgaggccagcttggacaacatagtaagaccaccatctctacaaaaaaatttaaaaactaaaaaatttcttaaaattagctggacatagtggtggaacacctatagtcccagctactagggaggctgaggtgggaggattacttgagcctgagaggcggacattgcagtgagccatgatcacaccactgcacttcagtctgagtaacaaagtgagaccctttatttatttattttgagacagagttttgctcttgtcacccagtctggagtgcaatgacgcgatctcagctcactacaacctcctgtctcccaggttcaagcaattctcctgtctcaacctaccgagtagctgagattacagccgtctaccaccacgcccagctaattttagtttttttagtagagatggggtgtcaccatgttggccaggctggtcgcaaactcctgacctcaagtgatccacccaccttggcctcccaaagtgttgggattacaggtgtgagccaacgtgcctggcgagactctctttttaaaaaaatgattaagaatcactactattgctataactacatattccaacctcatttaatcctcatagaaagaataaccttcataaggaataactggtatattagctgttctattgcatgtcattattagatttaccactaggggccccaaatagcacagcaaaagccttcaagttcaaaatacattaatatgtcaaacccaagtgggaggagaaatatattatcttgaaatgttggttggggccaggcgtggtggctcacgcctgtaatcccagcactttgagaggccgaagcgggaggatcacctgagatcaggagtccgagaccagcctggccaacatggcgaaacttcatctctactaaaaacacaaaaatcaccagggcgtgatggcaccagcctgtagtctcagctactagggaggctgaggcaggagaatcgcttgaacccaggaggttgcagtgagccaagatcgtgccactgcactccagcactccagcctgggtgacagagtgagactctgtctcaaaaaaaaaaaaaaaatgttggtgggaatacttagatatatgcaaatcaaatgcataacattaccatgataatgaattctcctccatcagatctttggctttcttctccaatggtttcttccctttagcttcaaatctttattttattttattttattttattttattttattttttgagttagggtctctctctctcacccaggctggagtgcaatggtgcaatcatggctcactgcagcctcaagctgctgggctcaagctgtcatccagccacagcctcccaaatagctgggactacagatacatactgtcatgctcagctacaaatctttaaaaataaaaccaacccccccgcccccacaaacttgtttgttgtttcttacatctcatttctcctttaatcttcaaccacttctactccaaccattttgttataaaagttttcactatggaagccaatgaccttctagaagccaaatccaaaggtcagttttcaatacttttagtaccatttgaaactgtttatcaatccctcttttctgaaacattccgcttttttgactctgtgagaccaccatattggaattcttttgtacttaagacagatatgtattggattattccttcaatcactcacgtaacaaacactaaacattacgtgctgggcattatgctaggccctgggaattcaaaacaataatagagagctttaaggagcttaatttctgagaggaaaaacaaactgacaattataaaaagtgacaggaggccaggagccttggctcacgcctgtaatcccaggacttcgggaggctgaggcaggtggatcacctgaggtcaggagttcaagcctagcctaggcaacatggtaaaatcccataaaaatacgaaaattagccaggtatggtggcacgcacctgtaatcccagctactcaggaggctgaggcatgagaatcgcttgaacccaggaggcagaagttgcagtgagctgagatcacaccactgcactccagtctgggtgactctgtctcaaaaaaaaaaaaaaaaaaaaagtgataggagctactacaggattaaaaggaagggacagcatctctagaagagagaagcctggggcagttcaaccaatgtggaactgcccattatctgcatttttcgtaggctcttaggactacagttaatcacaaaattttgaaactgaattttattaatgttcagaaaaaaagtcatataataaagtccccgagtcattccccaccccaaaatagggcccaggaaagctgccctaattgccttacccaagggacaggcctactatgggtaatctccaaaatgtttaaaaggcatatacgacatttactgcttctgtgtcctcacttaatattttctcctaaatgttctgcaacctttcatttcctatctgtgataagacaataatgaagtccaaattgccaaataagaactcacagtgcttcaccactgcagttgtgaaactctctccttagtttctagaacattactctttcctaaattgttctacctctccaatttctctctctctctcttcctccttgggccacctctttccattccacacacctctagagaatttcatccaatcccattcatataactaccacatatacaactgtgctttacatatctataccgagccaatctctctcccaaacttcagacctatatttctagcattactatatttgataggatcacagtagaatcaaaggtgagattcaaagccctacttgccttctaggcaggggaagatagtagagcataaagggatgacacgaagcagtcctgagaattcagaggatctcccagggcaagaaatatctgagatgaatgtgagatccacaaaacacaaggtttttttgtgtttttttttctttttctttttttttttttttgagacagattctcgcttttgtcacccaggctggagtgcaatggcacaatctcagctcactgcaacctctgcctcctgggttcaagcgattctcctacctcagcctcccaagtagctgagattacaggcatgcaccaccatgcccagctaattttgtatttttagtagagatgggatttctccatgtaagtcaggctggtcttgaactcccaacctcagctgatccgcccgcctcagcctcccaaagtgctgagattagaggcatgagccaccgcgctgggtggcacaaggttattatatataactgttatttcagtgtgccttcacttatttgtctaaatcaggggtgtctaatcttttggcttccctgggccacaacggaagaaggagaattgtcttgggccacacataaaatacagttaacactaatgatagctaatgagcttaaaaaaaacaatcgcaggctgggcgcggtggctcatgcttataatcccagcactttgggaggccgaggtgggcagatcacttgaggtcaggagtttgagaccagcctggccaacatggtaaaaccccgtctctactaaaaatacaaaaattagcttggagtggtggcacacacctgtaatcccagctacgccagaggctgaggcaggagaatcgcttgaacccaggaggtggaagttgcagtgagccaagatcgggccactgccctccagcctggacaacagagcgagactctgtctcaaaaaaaatctcaaaaaaaactcataatgttttaagaaagtttacaaactcatgttgggttgcatttaaagccatcctggaccacatgcagccccacaggctgtgggttgaacaagcttggtctaaacaaatacccttgtaagtgtagaactgttaccctaccctcctcaccccccccccaaaaaaaaacttgactagaaagtggccctattaattcaaaaaatagtaaatttttaaaaagtgtttatatcaaaggctactgctactaaatactccaatttataggagttgtgagtatgtgagtaggaggatggaaactggcaagggcagggggaaacaaaatatgtatgatagccaaattatacagacagaaaagttatggacaactgattaatttcaataattctaggatatgttttaggtgtactcagagggttaaaggtcattaagataccagatgaaacttgcaagtacatctccattaccgcagttaataattatacaatttctcaatctgcagaaggccgcttcagtcggaaaaaccaatacaaccataatcctttatctttagagtggtcagagtctgatgaatgggtcaaagatttctaaaacaggatgaattgtatcagcaggttttgtctttgcagaacactgcaactaaaaaaaaatgcttattacaaaacatgtatcattaaaagagagtgcttttcccctcttattaccagggagtgaaaaaactccctgtagtaatgccttttcatgtctattttaccaaaaacaccaaaaaaatcataaagttgctcaatagcatcaaatgacaaagaagccacatgggattgtaattaaaagcaagggatttggaacaagagagatgtgggttcaaattactactctgcaacttactcaaacttgaaattattgaagttaagtgatagttgcatggggttcattatactatcctttgctggtggttaaagaaagtcatccttttattctttgacctgattgaaccaaattcaatttgctatcatagttcatttgtgttaacaacacagtactaataacccacgtactgtgtatattcatgctgaactcttttaagaattactaaatgctgggaggctgaggcgggcagatcacgaagtcaggagatcgaggccatcctggctaaaagggtgaaaccccgtctctactaaaaatacaaaaaattagctgggcgtggtggcgggcgcctgtagtcccagctactctggaggctgaggcaggagcatggcgtgaaccagggaggcggagcttgcagtgagccaagattgcgccactgcactccagcctgggcaacaaagcgagactccatctcaaaaaaaaaaaaaaaaaaaaaaattagtaaatgcttgtacctaaatttactctttaaaataatagaaaatgtccactttttatgcaacttatgaaaagatataagatgatttttttcctcagaaacaaaagcagttgaagtttaaagctatcgctcatttagtatctcaaagtaatagccactaaagccaacctgtgagcagacaactgacttctcgactctctttgcataacttttaatttcctttgcaattgtctttggtattcaagtgagacatctgtaatcacattctcatcaacaactgagatgccttaggccagtgtgggtgagcctctcttattctggcttgcaatacaacgggaatttctccctttcactcttgttccagggcatttgccttctcccaataaagtccaagcactcaaacagaaagtgaactttactctagctggttttctggccttaggaatagggtgaggccaggtgcagtgggtcatgcctgtaatcccagcactttgggaggccgaagtgggcaggtcatgaggtcaggagttcaagaccatcctggctaacacgacaaaacccccgtctctactaaaaacacaaaaaatttgccaggcatggtggcatgtgcctgtagtcccagctactcaggaggctgaggcaggagaatcgcttgaacccgggaggtggaggttgcagtgagccaagatcgcgtcactgtactccagcctgggcgacagagcgagactccgtcacaaaaaaaaaaaaaaaaaagaaaaagaaagaataaaaagaataaggtgaacatgccttctgatttgcccagaacagtcctagtttaggcatgcccttctggtgtcctgtttagtcaggatcttttttccttctcaaagggttggagatagactatatggtattcctagttaagaaccatataaacacatgaataaatattctattaatgaagaatgtgccttctaatacactttatctaaaatattataacaggattaacaggtaaagggaaacattgctcagttttcctgttaaaatatttaaataacaatgaaatactaattgaaataaggttgaattttgtctaaaaactatgatacacatttgagactctcaagactgaggtaagactcaaatgaggtaagacagagaacccatgtttggcaactaagggggaaaaaagaggatcatggccgccaggtctgtgtaatgaagctatgagacaatgggataagagttttttggatccagcattactagaaaatgtctcagcccagatgtcatttgtccaatgtcacgcctaaggtcgaagaagaaatcctcaaattcctaaaatatcacactttgcctccccatccacaccatgcaacatcaaaaggccagaatttggccacgcacggtggctcaagcttgtaattacagtactttactttgggaggctgaggcagacaggttgcttcagctcagtagttcgagaccagtctaggcaacatggtaagactatgtcgctacaaaaaattttttaaaaaaattgctgggtagggtggtatgtgcctgtagtcccagctactcaggaggctgaagtgaaaggatcacctgagcctgggagatcaaggctacagtaagccgtgattgtgccactgcactccagcctggatgacagagtgagacactgtctctaaaaaaaaaaaaaaaaaaaaaaaaagtaaaaataaaaaggactgaactttaagactagtaatcatgaactcacaggtaggtgccaggggtatgcctgccaacccctgtgcttgctttcatctccacccacctcccacaaaagatgaaaaacaaaacaaacacaatcaagaaaaattaaaaaaaaaaaaagaactttgctacttacgccttgacattcctttgtgaaaagtcatactcagcaaataacaactccactatcccaattccccaggccaaaaaccttggcatcatcactgatatctttctttttccccgtgctctacttccaatttctcatcaaatccttttggtcctatctttaacgttcattcagggtttgaccacttttctccacctccacctgctactgcctggctcaaatcaccatccttcttccaccaccatccccctagaaaacagagtttacaaaaggaacttgccccaggtcaggaagactgcaggtagtggagggagtactggcatgtaggaaatcaaacagcagaacataagttcttaactaccacactgactctctggttttttgcctttgcacaatgtggagctagaatccaagttagaacactgccattgagtcatatgacatatgctcctaaagcactgatttatctaaagaggtatgaaaagaataaaacttcagcataaaggagcttccttatcaaagaattcccataagaaagttcattataacttaatgatggggtaaataactggtttttaagaagacttctctccttttaaaaatttattttttattcagctggtaagtacaagagaatttttttttaatttattttttaaactgtcatattgtaattgtacatacttatggggtacaatttgatttttttttttttgagatggagtcttgctctgttgcccaggctggagtgcgatggcgcaatctcagctcactgcaacctctgcctcccaggttcaagcaattctcccgcctcagtctcccgagtagctggaattacaggcatgcaccaccacacccagctaatttttgtatttttagtagagatggggtttcaccatgttggccaggctagtcttgaactcctgacctcaggtgatccacccaccgcagactcccaaagtgctggaattaccagcatgagccaccacgccgggccacagttcgatgttttgatacatatccatgttgcataatgatccaatcagagcagttagtgaaagaacattcaaaagcccctcttccagctattttgtaataatattttactcttaactatactcaccccactgtgcaatagaacaccagaatttgagatcaggagtttgagaccagcctggctaacgtgatggactaaaaatacgaaaattagctgggtgtggtggcatgcacctgtaatcccagctacttgggaggctgagggaaaagaatcatcttgaatccaggaggtggaggttgcagtgagccaagactatgccattgcactccagcgtgggcaacaagagagaaactccatctcagaaaaaaaaaaacaaaaaaccgaacaccagaatttatttcttctcattgtaacattggtttatgtgttattattgagaaaggatcttgctctgtctcccatgctggagtgcagtggcacgaacacagttcactgcagcctcaacctcccaagctcaagcaatcctcccaccttagccacctgagtagacaggactacaggcccatgccaccatgcccgcctttttaaacttttttttgagagacagggtctcactatgttgcccaggcttgtctccaatttctgggctcaagcgatcatcctaccttgacctcccaaaatgctgggattacaagtgtgagtcactgtgcctcgcctttttttggttttgttttgttttgagacaggatctcccgtcatgctttatcaccctgggtggaatacaattatggcttaccgcagccttgacctcgtgagttcaagcaatcctcccacctcagcctcccaagtaagtgggattacagacaagtgccaccatgcttagctaactttttatatttctattttttaatctttgtagacataggggtatcactatgttgcccaggctggtctcaaactccgggcctcagcatcccaaagtgttaggattacaggcatgagccaccatgactggcactaattttattattacatacctaggtatgattatatttgtttattctatttagagttcactgagtttcttggatctgagagtttatggttatcatcagatttggaaaatttatagtcactgtttctttttcttttttaaggaaattgcccaggctggtcttgaactcctgtgctcaaaaaatcctctcatctcagcctctcaaagtgctgggattacaggcatgagccaccatgatgagccactattttcttattttctttttctttttctttttctttttttttttttttttgagataggttctcactctgttgcccaggctgtagtgtagtggcatgatcttggcttactgcaacctacatctccctggctcaagcaattctcatgcttcagcctcccaagaagctgagattacagtcgcatgccaccaagcccagctaatttttgtatttttagtagagaagagatttcaccatgttggacaggctggtctcaaactcctgatctcaaatgatctgcacccccctcggccccccaaagtgctaggattacaagtgtgagccacccacctggccacccagacgctgtttcctaaagtaattccttctacctttccccacttttctggaactccaattatacatgtattaggcaacttgctattgtcccaaggttactgatgttctattaactttgttctagtattttttttctctttgtgcttcaatgtgaataggttctactgctataccttcacatttaatgatctttttttccgcagtgtctaatctgctgttaatcacatccagtttttcccccagttttggatattatatctggtatttttcatctttagatactacttgtgagtcttttggttttttttgcgacaaagtctcactccgtcacccaggttggagtacagtggcatgttctcagctcactgcaacctctgcctcccaggttcaagcaattctcgtgcctcagcctcccaagctggaattacaggcacatcccaccacacccagctaatttttgtatttttagtagagacagggttttgccatgttgggcaagctgatctgcctaccctcaagtctgtaggcatgattcaccacatctggcttgtgtctttttatctatcattcatttctctactagtcattataatacttgtattaacatatttggctgataattcaatcatcagaattatttctaataattccacatttctaggtctcttttctattgatttttctcctggttatgggtcattttcctgctttttatttgtatgcctagtaatctttcattaatatattattaatgctgaacattttaattgttaggtgctggcatttactgtattctttaaaagagtttagttttggcacataattgagttacttagaatcagcctggtcctttcaaaacctgccttgaagcttagggtaggtttagaaaggcctttagtctatagctaatttaaccccactttgaagactctagccaatgtcctttgtatgaaacagtctctccactatgcctaatggaaacataaactattcccagctctgtgtgagctcctggaattgttcagtgttctgatttccagtgtgactttctccagcattgctgacttccacacttcacatgtgcagatgagtgtccaatcaaagattctcttacttctatagatttctgtgtagttccttttattcttgttttctgccccacaaattctagttgccttgacttctccaaactctcctgggctctatttggattcccctactctgtgctacaatctggaaactgcctataggaacccctgtagggttcatatcagttatttcccttctctcagggatcactatcctgtgctgcctgttgtccaatgtctgaaaacagttgtttcatgtatttttgtcctgttttctagctgtttacagtaggagaatgattctcgtagcggttaatccctcttgggcagatgtactgactttatggtatccctgtttgtgtttttagtgcttgttctagagattacatatgcatccagaagttactacagtctcctttcacagagtaagaaatgtatgacagtataattccatctcctcctttttgttctttcatggttgtataatcacatatatgctgtaaaacccacatcttgttaatgtgtatgttttaatgttttttgagtccaggtctgctggaaacaaattctttccctttttgatatgtccaaaaagtctttattttgccattatttttgaaggctatttctgctggccatagaaatctaggttaacaggttgttttttttttttttctttcagctctttatggatgtcatcccattgtatttaacattctatttttccttttcttttctttctttgtttttgagactgagtctcgctctgtcgacaggctggagtgcagtggcacatgatctcggctcagtgcaacctccacctcctgggttcaagtgattctcctgcctcagcctcccgagtagctgggactacaggtgtgcaccaccacacccggctaatttttgtatttttagtagagacgcagtttcaccatgttggccaggatggtctcgacctcttgaccttgtgatttgcccacctcccaaagttctgagattacaggtgtgagccaccgtgcctggacttcttttcttttttaaatagagatggggtctcactactttactcaggctggactcaaactcctgggttcaagcatgtgccaccatgctcagctaagactccatttttttctggtcctaaaacatggaatagccataacccatgttgccattctcacataactaatgtgtcttttattctcctgttgctctcctgttgcttgtaagatctcttccatcttcagttttcagcagtttgattatgatatgcctatatatgggatttttaaatttgttggcttatttttgttttgtatttaacttgcttgggatttgctgaactccttccatttgtgaattgatgacctcatcaattttagaagttcctgagcattgtctcttcaaatatgtcttctgccacgttctcttctctccttctgaaactccaattacatatatgttagaccatctgatattatcccacagatctaaaatctcttttctacccctccctgactttttctgtcttttctctttccaatctgtcttcatattcactgattctttcttctgctatgtccataaactgttaagcccatgtaatgaattcatttctgctagtatatttttctttctcccttccctcccctcccttccctttccttttcttttctttcctttttttgttttccctggtctctgctagtatatttttcacctctatttaatagaatttcaacttggttctttggcataatttccatgactctacagaaatccccatcttttcaagcatattgttaacctttatcattcaatcatctagcatttttttcataattatctttaaatccctgtctgataaatctggatcatctctgggtcttcttctactgactatttcttctcttgacctttggtcacattttcttgcttttcttgtgccttgtaacttttcattacacaccagacattttatataaaaatagattacttattaaattaagtaatattttacttccagaaaaagacatgacaatttttctgttaggacactagaagggagtctgagtcaatccaatatgtaactgagctgggtgtgggctatgatgcagctttaatttaacattaatcactggcttcaaatatttaaggactgagatcaagcctttcacttgagcaggtctgggatctgagcctaggtaaaattacagagacctgcttgtgtttcatagccaagccaccaatttttaaaactgtgggagtaccttacatgtatactagagtagaatgattaagtaaatgggtggctgatggtaggagacagatttctcactattggagcaggagttttcagataagcaagggcaggaagttagaatcatccatgtagtgattcaactggaacctaatacatcaatataaactcatgtttagcttaattagatacggatggatacatatagaaatatttatagatatgtggatatatacagggtagtataaatacatacattttctggctctgtcagctgagatggcctacaagcaaaaacaccccagtagcaacatgtacacctagcacctagatcttggtttctccattctccagtaaaaggaaccaaggctccatggagaaatggctaattctaggattgagacagaaaaatatactagataaagcatatactaaagcatatactacatgctttagtctctaaatatactagagcatcttgtagtgccagaaagtgagaaagtgcaaacacacatacacacatatactgacagtggtatatcaaaaagtcataccaactgaaagagctcccagtggccaaagctggaacaacttgaacaataaaataaataaagcaataataagattttaacccaaggtataaaatatccataagtccatactaatattttaaaaattgaatggataaataaatgaggaagaagagacaaatcttccatgcagaagaaatctaaataatttatacagacactttgcccttgaggaggggtatcataactccccatgccttaagtgtaggctgcgcatatgtaacttccttccaaagagtacagtatgtaaacagaggagaaaaaagagtaactttgtagtaaagaaatacacaaacactacctcaaccagatgatcaaggtcaatatcaacactgattagtcatattgacagtatatccccttaatatgatgtgatgaaaatggtactgccaagcatagtggcacatgtctgtagtcccaactacttgggaggctgaagtgggaggattgcatgagcctaggagttcaagaccagcctaggcaatacagtgagactctgtctctattaaaaaaaaaaaaattagccaggtgtggtggcatgcatctgtagtcccagctactcaggaagctaaggagggaggatcatgtgagcccaggagttcaaggctgcagtgagctgtcatcataccactgcactccagcctgggtgacagagtgagacactgtctcaaaaaaaggaaagcaaattgtacttcacctgcatgttcttcgtcccaaaaatacaaaacctcactgtaacaatgacaaaaataccaaacagatatcaatagaatgacattctacaaaatacctgaacaatactcctcaaaactgtcagtcatcaaaaacaagagatgagaagctcaagtctaagaaaatgccaaaaccaagaggaccctaaggagacgtgacagctaaatgggatcccaaaacattaggtaaataaagtatggactttagttaatgaaaatatatcagtattagttcattaattataacaaatataccatactaatataaggtgttaaaaataggaaaaactaaaaaaataaataaattaaataaaaataggaaaaactagaggcagcattatgggaactctctatactatcttggcaatttttctttaaatctgaaactgtttcaaaaattcaagtttatattttaaaaaagaaagaaaaaaaagctgtaggaactctatctctgcattaagcgccacggtcagagtttggtttgctagattctccttgctctccagtcgcacaccttgctttctgaagctcaggtgccctcgtgcagccctgctcctcctccccagccaggcttctggagggcagcttccttacattctgtgaaggcctgaaatgaattagagcagtttcactcacctcttctgccctgtccccagtccttggtggctgaaaacatggactgccagagtgtggggtgagagttatttctagctcttcccctgcctgcagcattccagaactgaaagcctggagagcctctgctggatttttctcagcaatcctgccttctaagggtggttgccctatacttgggagaggttccaaatgcctcaggtattatctatgccagttcgtcactggcccaggcttttggcttactactcctgaacattcagtgaacatctgtgggtaggagctggagtgtgggtgcatacttgctctttggtgccagagttgctagggcttcttaggatcctaacctgtcaaaccagcccatacgtggccattaaaaatctgattttaaaaaaatgtggctggtttctcctttcccctcatctatggtggattcctattcctttcgttgttccatcctagagcaaccatgggtttcttctccactatgaaagtttgattactttctggagtttggttcatttaggctcccttgtatcctcagctcttcgatgggtttttagaaaccgtacttcttatcctgcttttataggttttcagttacaagaatggcaatatcttgtaattttgtacatctgaagaggaagctgaattctttccccagacctcgaatggttcactccctcagtacattaaggtctctgctcaaaagtcatcttttcaaagcagtttcccgtattacactatctaaagattgaccagatctcagtcacccttcatgccttcatcctgctctactcttcttccattgtcctcatttccatctgaaatgtatttgtcccattttttaactgtctcctccacaagggcaggaattttatttttcttatttgtcagtatagccccagctataaaacaatgatagggagcaaatatgattctttataaattataagtttaagcttgttttaaaactaattaactaaacagaaagttattgttgcatattataaaagaaaaagtactttcatgggagataagaagttttgaagcttaccaaaaaagaacctgtgtgatcatccttagacaacatattattctttaacatatatactttttccagctatatcgttctgtgtacacttagtgcttcctgatatcctgctatcaacccaggttctaagcaggaattacagatattcttcacaatagaataagacaattaacaattgttcttaatgaatggtaaaaagaacaatattcattacttgctaattattactcatctttttttgaaaatgacccaaatggcatctggaaacagcataacactaaaaattagattgcaatagaaaacaagaacaacgttttgatgattaaacataatagaaaggactgtagaaggagaacagaaataagtaagaaggaaaaatttagatattgcagaagtgatacagtaaatctaaggatttcaaagatattaattaaatacctcagattaatcaagaggcctaatgcacaaactaactggtcttttaaaagaaaccaattgggcacggtggctcacaaaataaaaaaaaaaagaagcaaaacactaaaaaaattaaaattaattaaaaattatttttttccattgctagagattttctgtctagacatcaatggcaaaactccacataaagcaatatagttaagaaagactactttggaatcagatcttaatgttaatctcagcttcatcatttgccaactatgtgacctttggcaagttaaccttccaaaacagcatctaaggttttagggaccattgagcccttcaacaaatatgtgagtactcattcaggacacaacaatgaataagattaatgaaaataattcacgaaaaaaacttagaacacatctggtacccaataaaagctcaataaaatactataacaattattatctcaaatattagataggattccaaacccccacttaatgcagaaatatagtcggttttgttttgttttgttttgttttgttttgtttttgagacagggtcttgtcctgttgcccaggctggagtgcagtgctacgatctcggctcaccacagccttgacctcctgggctcaagctatcctcccacctcagactcgcaagtagctaggactacaggcacgcaccaccaagcccggttaatttttcattttttgtagagatggggtttcaccatgttgccctggctggtctcaaactcctgagctcaagtgatccatccgcctgagcctcccaaagtgctgggattatagatgtgagccactgcacctggcaaaatataatctttaatattaataacaacaaatacattatcatggttaaaaatagctttttgactgtggttattggtgtaactaacttcacttctgctgggaccacattttggaagcaggccaacttccctttctgtcttaagtaatttcttatcagtcctttataacccttgtgtcgtaataccatttactgggggagaggagagcacctaaaatataatccttccaaataacctggtaaataaacacaaatgacaccaattctgtcatcattacatcacaaccatagaatatagatgagttcaaggatcaaaaataaaaaagtaaaaaacatctagaggcaaaagatttgaaaatcatgtatctaaatttgaaaatcatgtctagtacccagaatgtataaagaactcttacaactctacaacacaaagacaacacaatttaaagtgggcaaaggacttaaacagacatttctccaaagaagatatacaaatggccaacaagcacatgaaaaaaggctcaatgtcattagttactggggaaatgcaaatcaaaacaaaaagataccactttacacccactagaatgactataataaaaagtttttaatggaaaacagtgttggcaaaaatgtggagaaattgggacacttgtgtattgctaataggaatataaaatggtacagtcactgaggaaaacagattggcagttcctcattaagttaaagacagaattaccatatatgatccagcaattccacaccgagctatatacctaaaagaataaaaacaaatgttcacccccaaaaattgtacatcagtgttcataacagcactatttacaatagccagaaaaagcagaaacaacccaaaagttcatcaactgatgaacagataaacaaaatgtgatatatccacacaatgaaaattattgagccataaaaaagaaggaagcagtgatctatgctataccatagatgaaccacaaaaatattatggtaaatgaaaacatgtgacaaaaggccacatactgaatgacttcatttatatgaaatatccacaaaaggcaaatccatagaaacaaaaagcacattcgtggcttccaggggctgggggagggagggaatggggagtgactgcttaatgggtatggggtttctttttggtgtgatagaaaagttctagaactagaaagtagtgatggctgtaaaacattgtgaatgtacttaatgtcactgaactgtatacttataaataataaattttatgtatattttaccacaacaaaaaagatgcttaacaaaaaaaaaattagaaataagttctgggtaaagagaagatggaacatacatatatttaacttcatttcttccccaaattgtgctaaaatactaataaggtttttggggtttttttgtttttgtttttgagatagggtctcattctgtcacccaggatggagtacagtgacatgatctcagcacgctgcaacctccacatcccaggctcatgcgatcctcccacctcagcctcccaagtagctgggaccacaggcgtgcaccaccacaccgggttaatttttctatagtagagacggggttttgctatgttgcccaggcttctctcaaactcccagatgcaaggagtctacctgcctcgacctcccaaagttctgggattacaggcctgagccaccacgcctggccctcatcaggtatttttaaggcataaacaaaacttaaaagctagaaagcaaatgcataaatggtaactgacatagcagatccaagaaaccagcagtatggaaagccaaaaaccaaccttcgtccacggaatcttcaaaaggctcaggaactggtaacagatagcgcctgtagaaacaggtgtgaagggagcactaaataaagaaggctggctgaaagctccttaggaaacgctcaatctctcagtaccttcctaaataccacatggttaggttactatgcttttcccaccaaggcaaaattctagaggattattccctcaggaggatttcagagcagggaaacataaagcacattggtgcgggggaggcttaatgaaaacagaggccttaagaaaacacatatgtactgaatactgaaatcctcactgccctacttccctcactctctcacagaagtggcatacagacctcctcccaccagacaggaaattaaaagacctctctcccttttcagaaaagggaaaagtaatcagaagctgacatgaagggtgccccagcaaatgacacagatagatcaccctagagtgaactctagtcaacaagtaccaatgaggtactaagagcttccaatcagcttttagaggcataactgcaaacagccaaggattaccactcatctgaggaaagcatctaccacaaaaagaaaacaaaggaaaacaaaaaatagaaaaggaacttggaggaaacacggacaactgtgggaagaaaaaaacttaaaatttaaaaagaattttattagcaggaatttctgatgtcaataaaaaataaataaataaaaggaattttataccccatcattagcgtccatggaaagaatacagaagatactacactgtaatcccagaattttaggaggctgaggcaagagaaatgcttggcgcttaagagttcgagaccagtctgggcaacacagcgagaccttgtctactaaaaatcaaaaaagttagctaggtttggcggtgcaggcctgtagtaccagctactgggagggctagggcaggaggatcgcttgagcctgagcaatcaaagctgtagtgagccacgacagagcaagaccctgtgtcaaaagagtagatactccatccatgaaaaaaaatcgatacttttccaaagagctctcggaaattaaacttaggaaaatttatcagaaagaataaggaatcaaagagatggcaacagaatcaagaagaaaaaactggaggtccagtcaagataattcagcatctatgcaatggggaatccacaggagaaaacagagaggaaaaaaaaccagtgaaataattcaagaaaatgtcccaaaactaaacaatgtaagtttcgtaactgaaaacactgagtgaagccaggcacggtggctcacgcccataatcccagcactttgggaggccgaagtgagtggatcatttgaggtcaggagttcaagaccaacctgcccaacatggtgaaaccctgtctctactaaaaatacaaaaaaattagccagtcgtggtggtacacctgtaatctcagctactcgggaagctgaggcatgagaatggcttgaacccagtaggcggaggttacagtgaaccgagatcgcaccactgcactccagcctgggcaacagagtgatactctatctcaaaaaaacaaaacaaaacaaaacaaaaaaacaaaaattggcttggcgtggtgatgcacacctgtaattccagctactgggtaggctgaggcaccagaatcacctgaacccaggaggcggaggttgttgcagtgcgccaagatcatgccactgcactccagcctgggcgagagtgggattctgtctcaaaaaacaaacaaaaacaataaatttaaaaatatataaataaatttaaaaattaaaaaacaaaaacaacaacaaaaaaacactgagtgcagagcataattgtttaaaatacagtacaaccatattaaagcgtatcatttacaagtttcagaacagtggaaacaaagggaagatcctacaagcttccagaagagggaaatggctaacaatagataaacttccagaatgattttgtactttcaacaggcataacacaagctagaagacaatggagcaaaatcatcaatctcaatgttacatacagtgaaaccactaatgaagggtgagaggaaaataaagtgttttcagaaaacataaggtatcaaatatttgcctcccatgaaacaggaagacataagaggagaagaaacagaagtgccaatgcaggagaaaagaaaagagaattccaaggatgattgctgggcactatgagaaaacagagactactccatgttggagcactgtgctctggaaaagtcttcttcaagatgatgaaactgacaaagtaagtgaaggaaatgggaaatttgaaagaaaatgggaaatttggacaactgatagaatgtttaggttgagttagtcacaaggacacagcaaatcatgcaaataatttatgttctaacctgaaaattcaagtaaatcaattttttaaatgtttcttgaaaaaccgcaggtaaattccaaatacctatgagttgaggatggttacctatgagaagaggaaatgaaggtggaggctgagaattactgtttgttttaagaatccctgaaagaccacttgactcattaaactgtataacatttgaggggaaaaaaaattaagattaaaaagtatggaatatgggaaataaggtactgaggatttcccaaggacataaagcccaaacaaacctgacccctggaaactaaatcttacaaaattgccctgtaaaagaaaaacataaaaatgaattagagggaaaaagaaggaacattacttgcacgacatcataactccagccaaatgcatgacattgacagcagaaatccttgggtttctgtgcttctgctccctggtctgtcaagtgggtgtaataaccacagcattcctctcttaggactgttgtaaagcttaagtgagataatgcacataaaacacttatagcaacgctggctgtcagtattaacacagttgtgttttttctaataactgagatcctttttcatatcaaataatttcactgtcacaatgatcttgaaacgtttatttgaatacttaccttgtctacccaaacattcaaggcctctaatgctctcacataagcctcccaacaaaaaagtgggaggcggggggtgggggatggggggggcgggtaagagggacaaaaaacattctgatgatccatatccaagagaaataggaaaaacaactagtaaagaattagtgaaagttatttctaaagattcttgttctactgaagaactgactgtacctaaaaactactcagtagtttttatactttttagttgccgtaatcaatctttcactctcactaggcaagttagcaattaagagtgaaaactttctaccagctatacattaactcagtaatgctaggacaagcatttttccatttcacaataggtagcctccaacttatgcacagattgtgctctccaaattgagttatactttgttataaaacttgtgaaacgtttcctcaaagaaataaaattatgaaataaagttgggatcccaggcaataaacaaagggcaatttaatccatagagtagaacaatttattcctaagagccatggaaaaggaaaggaataaatgtaactgtgtcagatgactttcaaccacttattttgtgctccccacagctagtaaaaaaaaaatagcatttatgtgagattaggaattgtgtaatactttgttctcttcatctttgtattctggtaacacaaacagcatataacacagtacctgccttctatcaggagcttaaaatattcatttaaggaataataatgagtatgaatatatagcactgttcaaaccatactgtttcaatggagaaatacattatcatgatttccaactgaaagaatgtcttcctttatcttagcaggacaactaaagtttaagcaccaagaacaataaagtgtacgcagctattccacggatgtaacaatcattcctcctagaaatcatattttggtcacacatcactcagactatttctaagtatgtataaatcatgaagttgagttttaataatataaaacttgacctccataatgtccctgacttcttttcctttattaataccttaaataaaaatagcagccatcaacattttacctgggtttttttttttaatttgcagtttctatactacttctagttagtacagaaggttatcaactgcaaacttaatactatggccaaaaaaacaaaatcaaaaaagtcattaagactcaatattcagacaataatcttgattaaaacccagtatttctcaactgggtgtggtggctcatacctgtaatcccagcactttgggaggccaaggtgggaggactgcttgagcctaggagtttgaaaccagcctaggtgacatagcaaaattccatccctacaaaaaaatttaaaaattagccaggcatggtggtgcacacctttagtcccaactacttgggaggctgggttgggaggatcacacgagcccagaaggtcaaggctgcagtgagccatgattgtgccaatgtactccagtctgggtgacaaagtaaggctgcctcaaaaataagcaacaacaaaaaaacccaatattcctctggctcgaatgcagctacctgtatttagatattcccaaagtgaagttgacaaagttatccaacacaataacagaaattattttaggtaccaaaaaaattgcaaaaattactgagaattattattattattattattattttgagacagagtctcactcttgtagcccaggctggagtgcagtggcgtgatctcggctcattgcaacctccgcctcccgagttcaagcgattctcctgcctcagcctcccgagtagttgggattacaggcacccgccaccacacccagctaatttttgtatttttatttttattatttatttatttatttttgaaatggagtttcactcttgtcacccaggctggagtgcaatggcacattctcaactcactgcaacctccacctcttgggttcaagcaattctcctgcctcagcctccccagtagctgggatgacaggcacccgccaccacgcccggctcatttttttgtatttttagtagagacggggtttcaccctgttggccaggctggtctccaactcctgacctcaggtgatctgctgccttggcctcccagagtgctaggattacaggcgtcagccaccgcacccagccaattactgagaattataagttaaaattacagaatttagtagacaatgtagtcaatgtccacaatgatactgatatcttaaaacctgagaaattcacctaacaaaagaagtcccttaattttacattactctaaaaaaaaatttgatccctttaatatatccctaagggaataaagattaaaggaataaagattaatttatcctagagagccagagttcacttcaagctttaaggaataattcacaatcatccaaacataaaattcagatggacaccttaaatgagatatgagtttcatctagcatcagaaatcactccaaaggcattatttctcttaagcaccccttctgctttgaaattcaatactgccaatgaaaccaattaattttatttctttgtaatgacttcataggacaggcatggtggctcacacctgaaatcctaacactttgggaggccgaggcaggaggatcacctgaacccaggagttagagaccagcctgccaacatagtgagaccctgtctttacaaaaaataaaaaacaagctgggcatggtggcatgcacctgtagtttcagctactcaggaggctgaggcaggaggatcaattgagcccaggaggttcaggctgccgtgagccatgatgatgtcattgcactcagcctagtcaatggagcaagattctgtctcaaaaaaaaaaaaaattttttttaactataatgactttatctcacgcaaatttacaaagggtgtataaatatttgttaaaacaaatataagaggttgagttgataatcaccagtgagcgacagcagcagagacacacggtcatcagtgaaggagacagaaacatctctaaaccacccaacacaattaacgcggtgtcttccacatagacttttttcttttttttgagatagggtctcattctgttacccaggctggagtgcagtggtgcgatcacagctcactgctgcctcaacctcctgggctcaagtgatcctcctgcctcagcatcccaagtagttgggaccaaaggtgcgcctcaccatgcccagctgatttttgtattttttgtagagacagggtctcaccatgtttcccaggctggtcttaagcccctgggctcaagcaatcacctgcctcagcctcccaaagtgctgggattacaggcatgagccactgtgtatagcctcacatagattaagtgaggtcactgtatgtgaggtcattgtataatatttttcaaaaatgttattttacttccaagaaattataaatacaattagttatatctactcctgtcactttaaactttattatatcaatttttattcacaaaaacatgcattatttcagacattataattaatgaaacaatttttattcatttgctttaagttcatttcaaatccaagattcatattataaaaccactctccctccctgaactacacatctctagttaaatttagattcaataatgttttccatggaaataacaaaactcaagtcctctgtattagtaaactgtgtaataaaataggaaatttactaaggaagagcaaagcaggagccctgtatgtcacttttagataactatcctcaaactaaactaaacactttcaattccaagcgtatttcaaagttttaggagaagcaggtggatggagtaaggagatcgtgagaactaactcactactgcgaggacaacactatgccatgagggatctgccccatgacgcaaacacctctcaccagaccccacctcaaacactgggaattacaattcaacataagatttggtggggacatatatacaagctctattagggtgacggcaaaattctggaactagataatggtgatggttgcataacaatgcgaatgtacttaatgcaactgagactttcatgctgtgtaaatatagatctcagtcaataaaagaaacagtacaccagcctggccaacaactgctaaaaatgcaaaacttagcgaggcatgcacacctgtagttccagctaccctggaggctgaggtgaaagaattgcttgaacctgggaggtgaaggttgcagtgacccgagatcatgccactgtactccagcctgggtgatagagtgagaccctcacttagaaaaaaaagaaaaaagaaaccatagcactatataacagaaagtagacattgacatctcattgaagaaagtcaccttctaaaataaatgttgattattttggtatccctttaaaaatcttactgggactcatgcctgtaatctcagcattttgggaggccaaggcaggccttgaggtcaggaattcgagaccagcctagccaacatggtgaaactccgtctctactaaaaataccaaaaaaaggccaggtgcagtggctcacgcctgtaatcccagtactttgggaggccaaggcgggtggatcacaagttcaggagtttgagaccatcctggctaacatggtgaaaccccgtctttactaaaaatacaaaaaattagccaagcgtggtggcaggtgcctgtagtcccagctactcgggaggctgaggcaggagaatggcgtgaacccgggaggcagagcttgcagtgagccaagatcaagccactgcactccagcctgggcaacagagcgagactccgtctcaaaacataaaataaaaataaacaaaaataaataaataaaaacaccttattgttaacttgataagtaaattataaacatgtcaaaatgaaatcttttactatagtgtcaatccttgagcttttctatttgttaggaattctcataacactcttagcaccagctttccaatgcttagtctgccagggcaggaatcaattttatatagtgttgggtgtccaagggagataatacagtcctgggttcttagtttctatttctggttgggccagtaaagccccttcctcatccctcctttccacttatcactacagacagaaactaaaaaccatggcttcaggctgctaaaagcatacaataaaacaaaatcaaacaacaaaataaaaggaaggatggacaggctaggaagtgaattttaaaatgggcagaatatttgattaaatttagcttgccaatattgtgttaaattttaatacaggagagtaacatctttatttctaataaacaagatcagcaaaagatgaaaaactttttagataccaaaatataccttggtctgctgtagcacttgggaatcataaatctctcttgtggcactcatgaatgtagccttttttttttttttttttttgacagtcagtggagaaagacaacatggaaaaaaaaaaaagccacgccaaatgcaataacaagcccatcaatttctgttacctcaaatgcaatagaaaataccacttttggccaggttcagtggctcacgcctgtaatcccagaactttgggagaccgaggcaggcagatcactggaggtcaggagttcaagaccagcctggccaacatggcgaaaccccatctctacaaaaaatacaaaaattagccaggcatggtgacatatacctgtgatcccagctccttgggaggctgaggtggaagaatcgcttgaacctaggaggcagaggatgcagtgagccgagatcacaccactgcactccagtctggccatcaggacgagactgtctcaatttaaaaaaaaaaaagaaagaaagaaagaaagaaaataccacttttgctgaacctgattacaggcaaggccaaattcagtcacttgcataataatatgcccaacattcgttcacaatgttcctgcctgctcttaacgggctttgagtagagcaggctctcaaaagccatgaattatatgaattatcaaattaaacaacagtttccacttaaaataataacatttattttgggaatatacaaaccagacaatgaactagatgttttatacatactattactcactttagcctcataatactttagggataggttaagtagcttgcctaaggtcacaacactattacattcaaaagccaggattcaggccgggcttggtggctctcaactgtaatcccaacactgtgaggccgaggctggtggatagcttaagcccaggagtttgagaccagcctgggcaacatggtgaaactctgtctctactaaaaatagaaaaattagctaggcatagtggagcacacctctactcccagctactcaggtggctcaggtgggagaatcacctgagcctgggaggcggaggttgcagtgagcagagatcacatcactgcaccccagcctcagccacagagtaagaccctgtctcaaaaaataaaaaattaaaattaaaaagccaggatttaaaccaaggtatgtcatacataaaatcattttttgctaaaacactcttttttttttttttttgagacagagtttcgctcttgttgcccaggctggagtgcaatggcgcaatctcagctcactgcaacctctgcctcccgggttcaagcaattctcctgcctcagcctcccaagtagctgggattacaggtatgcaccaccacacccggctaattttgtatttttagtagagacagggtttctccatactgaggctggtctcgaactcctgacctcaggtgatccgcccacctcggcctcccaaagcgctgggattacagacatgagccaccgcgcccggcctaaaacactcttaagtgtgggctgcaaaggaaatattttcagtttacttggcaaacattaatattctctcttgaatacagcttttaaatgttaaggaatgagaaagaagaacgtacttgaaaagaatattactgaaaaatgcagtgagatgtctggaagaaacatgcaatggctgtgtgcctactatgtgccacatgctgtgctggctatattaaaaacttcaacacagccgggtgcagtggttcacacctgtaatcccagcactttgggaggcctaggcaggcagatcacgaggtcaggagatcgagaccatcctagctaacacggtgaaaccccatctctactaaaaatagaaaaaatcagccgggcgtggtggcgggcgcctgtattcccagctacttgggaggctgaggcaggagaatggcatgaacctgggaggcggagcttgcagtgagccgagaccatgccactgcactccagcctgggcgacagagcaagactctgtctcaaataaataaataaataaataaataaataaataaataaataataaataaataaaaacctcaacacttcactgttacagcagccttgggagggaaatattggtaatctcttttacatatgaagaaactgaaacgtagagaaaccttcaaggttacagaagttgcaagggacagagttggaactggaaatcaaattcagctcattaatacctatcactagtgcttactagggggcatttcaaatagaatattagaaatctcatcaaatacaactcaaaccaacctattttttctttgctcagggagttgttgtgaaaactgagaaatccctatagatttttcttccaatagccttattttaaataattatccacacttaggttatatatgttaagtactgcccataaactccaaaagttgattgctatgaaaaccaaacaggcatccagtagtaaatgtgaaaatataagcaattctgtcctatatacatgattttttttttttttgagacagagtcttgcactgttgcccaggctggagtgcagtggtgcgatcttggctcactgcaacctccgtctcccgggttcaagtgattctcctgcctcagcctcccaagtagttgggactacccgagtagttgggactacaggtgcgtgccaccatggctagctgatttttatatttttagtagagatggggtttctccatgttagccaggatggtctcgatctcttgatctcgtgatccacccgcctcagcctccaaagtgctgggattacaggcgtgagccaccggcacccggccctatacacatgattttgaacatactgacagatggagaaaaccactttggaaaagatacttcacatgttctagagacgatttaaaccattaagcattctatgaagcttctgaaggtctgtcagattttaaatgacaacagtgaaattttaaaacaagaacaggagaagtcagcaccaaagctactttaacattaataataagtgagccaataaataggtctatgtttgcccaggcaggttttgcttattatgtcagttggaaagccagaaggaaactggttttaactcttaatataacctgtatcatgacaccatcactttaccagaaatgtagctgatgtcagcataagactgagacagtttacatttaaaactgttgtttcctttccaactattttcataattcattcatggtataggattgagactatttccttaaacagaaaaaaatgggtaattaacattgagaactttccatgtgccagatactgtatgaactgtcttaattttcatagccaccctgcaagatattatcctcatctttttagaggaagaaacaagtttcaagaaacgaagtaggttttgtaaggccacagctatagtaaagaggtggagctgacattcaagcttggatatgaattattataatttccacagcactacacagctgtcattttctctacctgcaaaactaaataaatactgctaaaaataaaagatgatctccaagatctctaaacattaaaattttacaataaactggttgaggtgacacatgcctatattttcagctactcaggagtttgagactggcctggacaacatagcaagaccctgtctctaaatttaaaaaacaaattacagtaagataatcttagaccagagaaaggaaagtgaaatagctatttggattataaactgttttagtaactcaaatgtaatgtgtggtggtgacaatatctttgattcctgggaaggtcattgtgaaagggaatagaaaatgccttgaagtcaaaatataaggctctcaaatagaaaaataaatataacatttaagtattgtcaacagagaaccaagttagaaaaaactagttatagtctgaaacaatgctgtttaaaagactgtagtcaccagtgtaaactgactcaggcaacacttcccagggtccatgccgtggacaactgactaatctctctataaatactaaaagataataaggttccataaccaaacaagatggggaaatgctggatttaatgtcaagcctgtttccatactggttataggcttgagaatcctatggagcaagtctttctggatttgaatcccagctcttccattccagcttagccgtgtgacttaaattgagatagttgctgtaaagactggaaacaataatgcatgtgggagccttagaacagagccttagacagtgctcaataaatgttaaatcattaatagtaacatcatttcccagagcctttattaatctaagttgaggttcattgtgaattaccaacgggatagagtttgcagtttctcaaacttattggatgatggaacccactttttcatagaatatccctcgagaaaactggttaatgtctttaaaacaaacaaaactcttcgaaacaatagagaattccatcaccaaaataaaatgttgttttttgttttttttgggttttttgagacagggtttccctctgttgcccaggttggagcgcagtggcacaatcacagctcactgcagcctcaacttcctgggctcaagagatcctcccacctcagcctctcaagtagctgggactacaggtgcatgccaccatacctgactaattttttgtattttttgtagaaacaaggttttgccatgttgcccaggctggtttcaaactcctgggctcaagccagctgcccacctcggcctcccaaagtgctgggattataggcgtgagccaccacacccagcctaaaacgtttttaaaaactgaatttttcttcactaaattttccttacctcttatctgctaccacctgcctttgagcaaaagttcttttttgtttgagactgagtttcactcttgttgcccaggctggagtgcaatggtgcaatctcggctcaccgaaacttccacctcccaggttcaagcgattctcctgcctcagcctcccgagtagctgggattacaggcatgcaccaccatgcccagctaattttgtatttttaatagggatggagtttctcaatgttggtcaggctggtctcaaactcccgacctcaggtgatctgcccacctcggcctcccaaagtgctgggattacaggcatgagccaccttgcccggccgcagctaaagttctaacagatgacactctctgatgttcactaaagacttgggaacgttgtctctacttcataaacccactccatagctggatcctgtattctgtcatacccagcaactgctcctcccgttcaatcttcatttccactatccagtcttgaacaccaaccacttcatgtcccagcagccaccttctggtttcatttgttccctattcagcctagactcaatggcccatcacttcaaacactctcgctactgaaatatcttgcctccttaccctctctgtcacactgacacataaaacccaggccaagaccaatccaactgttcaattgtgtgctcacccaggctgctgagccctgagagaaggaggaaatcattcatacaaatatatataccacagccgtgaaaaatccatgattccattttttctaagtattcccactcagcttgccctctcacttccctcagaggctttcttgaaattctccttttctcctcagtcccctacaatcatcatttcatccccactataatctcagtggatgaccttatccccccttcactgaaaaaaataaagtgttgatatccagaattctcacttgccacccaaacacttccccatctgcaccatctattgttcctttattcctacttcagtggaaactgtattctcatctgtactgcaacccagtatcttcactccattcccactaacctcaaagacaatgtacaatcattcacacacacctcctttattctacatcttcaacttctcccttcctttttcctttttccatttagcatataaacatgctgaagtctctctcatctaaacacagcctgcccctctacctactatcttgtatctccctatgagcaaagcttcaaaaagagcaaagctttctgaaaagaatgtttgcacttactgtctccactctcaacaaatatccacgcttagtcctcagcaacctggcatttatttctatcatggagactccactgaagctgttctacagaaggtggcaatcagctgcttaactccaaaatcaagggacacttcccggtcctcatattcattcaactgtgggctacatttgacattgcagatggctcttaaaatttttgtcttcatttaataaatatttactgaaagctactttgttgataagaacttcagataaaatgatgaacatgacacagtcacaagccctcaagaagcttaaagtttctatgataattcctactcctccttccacctctcagatcactccttccttctctactcaacctttagagctgatattcccccatgactcctttctttgctcttctcacatccatcccaggattaacgtgtttacattacctattcattgatgttgacgaaatttttatcactagcttagaatccttgacctttcatcctcctcaaactgtctagtctcaattttttgtcctcttccaagtaaaactttcagaaaactatctttgcacactccacttcctcatatccaattcacgttttaacccatgacaatctgaacgttttaacccatgacaacccactacactgaaactcctcttacaacgtcaccactacctcatgatgttaaaatggacgtgcttatcattattcaagctttcagggcattctcaacagaactgacccactccactatctaacctgtacatgtgaaatttggcacagctgtatactggaccctactctatttcccatactctatccctaggtgttcctacccattcccattgttttaaatatgacttatgctgggcgcagtagctcacacctgtaatccaaacactttgggaggccgaggcaggaggatcacctaaagtcgggagttcgagaccagcctggccagcatggtgaaacccccgtctctactaaaaatacaaaaattagctgggcatggtggcccacgcctgtaataccagctactctggaggctgaggtaggagaatcacttgaccccggaggcggaggttgcagtgagccaagatcgcaccactgcactccagcctgggcgacagagcgagactctgtctcaaaataaataaataaataaatatgacttataactctggtccacatctttcctgagctctagcttcatttactcaactctccacttggaaaccccatttggacaaactcaatttatccaaaatgtccttaattttcccactaagtctcttccagaactactggagttattaaagccagaaacaaagagccacacgtgactacttacttttcctcgcctctcatatcaaactatctccaaaatatattttggctattcagttatcttcaactcactactatgtcataatatagctattgttatttcttccctagagtactgactggttttttgtttgtttgtttttgtttttttgagactgagtcttgctctgtcgcccaggctggagtgcagtggcgcagtctcggctcactgcaacctctacctcccgagttcaagtgattctcctgcctcaatctcctgagtagctgggattacaggcacccaccaccatgcctgcctaatctttgtatttttagtagataaggggtttcaccatgtcggccaggctggtctcgaactcctaacctcagatgatctacctgccttggcctcccaaagtgctgggattataggcgtgagccactgcacacgggcttgactgactttctaaccaagttcaccaatgtcaccttgtccctaccaatccagtctccaggagaaagctaaagtgatctttataaatataatataaaatcactactcagacttttggctaagatcaagtgtaaatataatataaatataaattgaaacacatcactcactatttaaaacccttcaattgatatgctggtaatctaattttaaggtagaacagagtattctctttcccacaacagaatgttgctccaattctctggcaactcattctgtgggtcagtggcattcaactacttcagtacaaagacaagcataagacacagaagttaactgggttaactaaaggttactaaacctttaccaaaccttactaaaggttactaattatttaattccaaagcaaataccataatttatcttttttttttcaagacagtctcgttctgttgaccaggctggagggcagtggtgtgaccttggctcactgcaacctctacctcctggattcaaataattctcgtgcctcagcctccccagtagctgggatgacaggcatgtaccaacacgcccagccaatttttgtttttttaatagagatgggttttcaccatgttggccaggctgttctcgaactcctggcctcaagtgatccactcgcctcggcctcccaaagcctgggattacaggcttcagccactgcactcggcctatacttttttttaattgagataaaattcacatagcatacaatttaccatttcaaagtatacaattcagtagttttagcgtattcacattttgcaaccatctacactaattccagaacatttctatcacctaaaaagaaccccatacctattaacagtcattcccaattgcctccctccccatctcctagaaaccattgatctcttttctatctctatggatttcctgttctaaacatttcatataagtgggatcataccatatgtgatctttcgtggcttctttcactcagcataatgtttttaaggtttatccatgttgcagcatgaatctgtacttcactccttcttgtggctgaataatactccattgtatggatggaccacatactggtttttgtttttgttttgttttgttttttgagacaaagtttcgctcttattgaccaggctggagtgcaatggcatgatctcggctcactgcaacctctacctcccaggttcaagcgattctcctgcctcagcctcccaagtagctggaattacaggcataagccaccatgttcggctaattttgtatttttagtagagatggggtttctccatgttggtcaggctggtcttaaacttccaacctcaggtgatccacctgcctcggccttccaaagcgctgggatttcaggtgtgtgccaccacacccagctggaccacgtattgtttatccattcatcagctgatctacatttaggttgttcccactcttttacaattatgaatattgttgctattaacactcatgtacaagtatttgtatggacatatgttgtcatttctcttgggatgacctaggaatggaactgctgtgtcatatggcaactgtatgtttaactttttgaggaactgccagactgtttcccatagcatctgtatcattttacatctctataagtaaggaacccttatagggttcccatttctccacatcctcaccaacagttgttggggttttgttttttgggttttttttttttttgagattttttttaagttattatagtcattctagtgggtgtgaattggtatctctattattattattattatcattattattttagagacagggtcttgctctgccgcccaggctggagtgcagtggcaccatcactgctcactgcagcctcgacggcacaggctcaagcagatcctcccacctcagcttctcgactagctggaactacaggcacaaaccacgcctatctccctatgttgcccaggctggtctctaacttctgggctcaagtgatcttcctgactcagtctctcaaagtgctgggattataggcaatgagccaccacacctggcctcactgtgatttttatttgcatttccctaatgaataatgatttcaacaccttttcatgtgtgtatttcatgtgtttatttggccatttgcacattttctttggagaaatatctcttcaaattctttgccctttttttttttttgagacggagtctcgctctgtcgcccaggctggagtgcagtggtgcgatctccactcactgcaactgcagcctcctgggtttaaaccattctcctgcctcagcctcccgagtagctgggactacaggcacccgccactacacccagctaatttttttctatttttagtagagacggggtttcaccatgttagccaggatggtctcgatctcctgacctcgtgatccgcccaccttggcctcccaaagtgctgggattacaggcgtgagccaccacacctggcctgcccattgtttcaattggattatttgcttttttcttatggagctgtgatagttctttacatattctaaatactagacccttaacagatacacaatttgcaaatatttaatcccattctgtaggttgtcttttcactttcttaatgatgtcctttgaaacatagaagtttttaattttggccaggtgcagtggctcacacctgtaatcccagcactttgggaggccaaggcaggcaggttgcttgagcccaggaattcaagaccagtctaggcaacatggtgaaaccccacttctttctttctttttttttttttttttgagacagacttgccctgtcaaccaggctggggtgcagtggcatggtctcagctcactacaacctccacctcccagactcaagagattctcgtgcctcagcctctcaagtagttgggattacaggcgcgtgccaccatgcccagctaatttttgtatttgtagtagagaggggatttcaccatgttggccagactggtctcgaactcctgacctcaagtgatccatctactttggcctcccaaagtgttgggattacaggagtgagcactgtgcctggccccaattcctataatacaaaaaatacaaaacttactgggatgtggtggcacatgcctacagtcccagctactcagaaggctgaggtgggaggaccgctcgagtctagagaggttgaaactgcagtgagccatgatggcgccactgtactccagcctgggcaacatgatgagaccctgtctcaaaaaaataaaaactttaaaaaaatttttttaattttaagggccaggcgcagtggctgatgcctgtaatcccagcacgttgggaggccacggtgggcagatcacgaggtcaggagttcgagaccagcctggccaatatggtgaaaccccatctcttctaataatacaaaaattagccgggcgtggtggtgcgtgcctgtagtcccagctacttgggagactgagacaggagaatcgcttgaacccaggaggcagaggttgcagtgaaccaagatggcaccactgactccagcctgggcaacagagcaagactccatttcaccaaaaaaaaaaatttaattttaataaagtccaatttatctatttgctgtttttgaaactgcatttatgaggagattttggggacaagggttaaatggtgacagaatagtgtcctttgtgaggatgtgaaatggaataattcggataaataaatagggtttatgtatcattgattactaattcttgctacagtatgatgagggcaataacatgtttgaaaatttaaccttaaagttttgctaattccagtagtagcaaaatatttatatagccctaaataaattttgaggaatcaaaggagtgatacataataagtgaatacatataaaatgttgattgcaaacaaaggaaagatgattgagagaatataatttgtcagggcattttatttgcaggacataataaaactggacaataatatctatctcatacagtccttgtattagatatattaatcttataaagtacatgaaagaatgcttagcacatagtatttgctatatgagtattatttattatcagtagtattcttattaagtatctagatttagagctaccctgaggctctactgaatatagtacgtaagaaatttctcattgtaacttcctcttttctgttttgcacacatttcttgtaggattacctgaagaaatattctcagtattgttccacatcaagatggccactagtagcactgagcttatatcttactagctaagctactttttcagaaaatgaacactgttttcctcaataattccaacaaaatttctagttaagtttctcattagactaggttggatcatgatcgtattacaaaataaaacatatggttaatggggtagcatctttattttgggcaggttgagacatattatgaccactgcccatgatgattaggtccattgttctcacatggtgtgaactagaagtgaaagagaggtagaacttcaaaaaagattgaaatgctgctacagaagaaaaagaaaatactgaggtctctgtaaccacagatatttatgttataagaaatcaatacagattaaaaattaggtaaaaaaattgatttactaataatcttgatctttagccacatttctctgaaataaatttgctatgatgccgtgatggggatcagcaagctacgttttccaagttccttcaagtgggatcctgctacgttctgctattgggaggtactagagaaacataggcaagagaatggaagaatagatctccttttcctgtttgtttgccgtccttgctgatattctcccaagaacatccccttgccctaggagcagtaattgtttcagtttaccaattttttcagagccccagaaagtgcctcttcagaggtaacagcagcagttggaacatatctctccctcagaggtctagcctcagctcaggaaggcttttactctgagtttacaaattttaataactccagtctcttccctttattcatctaagcttctgaggaagtccgtatgtggccacgagatggtggtgatagcttcatcttgcagtcattttctttgctttccacagtgttgttacttttttctcctatttcctatgtggtcaaattttaatattaactcatagtcatagtgtagtattcatactttatgtgaaatgaaatgttttttataatgtagccatggcctaccaatagcatattttcttttagatttcgcaatatatattatatatattttgcttcagtgactttatatgcttttttgttgcccacattagttttttatatacaaaacatccaatattaccctggtcccatcatttcttctgatatccattgtcctgtgatttctcctggaaagtgaattgtttatctgtccatttcactctgtgaagtcatacaggtctatctatatagaactcctgtgctccaatttattccttgtgtgaaactgggcaattttttaatctcggaatatgtttcttcatatgcaaatcagagataacacttacctcacaacattgtttagagcattaaaagaaatataatatgatatcattcacacagaatttccctgggtgtgaattgaacaatgtcagtatttctcccatttaatgtgaaaacaaactatataaataaacaaaaaaaagtataaaagaagaaaaaatatcaataaaaattattataaaatgtatacatattaaaatattatcaagagtcctatacaaattgagtttttcaaaaataataaggattgtaacttttatattgcagttaatgcaagaagcattatgaaagagaatcacatgtctagagcaaagtgatgttaatagtgtttatgtttgagccagatggaactcctcataggagcacacagtgctcatctcctcccaactttgcattcaaagaaatcatattcgtaagccaaaattggtcatagaggaaatattcaacaccactaaattaagcaaactaaaaatacagcagtttttctcagtgaactggttgttaaatacatactaaatcaccgctaggtggcataggccctcataaatggcaaaataaaaatgggactgcttagtttctattttgttactttctttatttctgaagagaatgagttcaaattttaacagcagagaaaaaaatatagttatgagagaatcagactttcaagtatgtggggctattttagggaaggacatagatgttctaaatttatcctagccaagaaaaaaaatgtgcttggttggttacagatgaaaatcattaaaatcctcccataggattattgatcagtctaaaccaagggtccatttttttttaaagggtcatattgtaaaaatgttggtctttattggcctgtttctgtctcaactaacaaactctgctgcattagtgtaaaagtagccatagacaaataatgtaaatgtaaatgaataaatataattgtgttctaataaaattttatttgtatatcaaaatttaaattttagcatgtcataagttattatttgggttttttcaatgagtaaaaaatgtataatctacatttagtttgcttgctctactaagtgaggtgggggccagattcagcttgaggagagtagctagctatctcttagtgtaaacaatatatattatttagtattcttttgaagtgatcaacttggttataatcatggtaagctggcaagtgagttgtaagataaggactatattagttaaggttctccagagaaacagaaccataaatgagatagataactaagacagatgtagacatagaggtagagatagagatagagacagatgagataaagatacagatgatacagatatagatgacacagagatacagatacttttacagatgaaatagatagagaaagagacagagatagctagaagaagataattcttgggaggaattggctcacaaggatgtcgagactgagaaattccacaatctcctgcctgcatgatggaggcccaggaaagttagtgatatagttcaacctaagcccaaaagtctgagaaccaggtgttccaatatcagaggataagagaagatggatgtcccagctcaagaagacagattaaattcgcccttcctctgcctttttgttttatttgggctctgaatagattgaaggatgcccatagatattggtgaggatgatcctcttcactcagtctacctattcaaatgctaatttctctggaaacacagacatactcagaaataatgttttatcagccatgtgggcaacccttagcccagtaaaactgacacatgaagttactcatcacagggaggtctgggacaattcacgtctttgttaatttaaatagacacatgaagaaattattttttctcttttcttcttctttctctttctttttctttctttgtctttctctttctctttctttttatttttaactaaaggacattttgtaagcacatgaaaccagagaattgcagtagccatatgactactatgaggtgagaaaaaggaaagtttttgcatcctgcagatctgccccatctatggtctttgtgttaactgagacgacaaatacgttactacctaagcttcctttagtaacgtctcccactacctttatgttaaaacattttaaaagataaaattaaaggtacaaaattttgttcttttagagtggaataaagtgggctttcataagctcagatgtgaattttacaatgattctggtcaaatttttcagataattttagaaaattgtctaaaaatactctaaatctagtgttaattattagacattattttttcaaatgttattaatattatagtgttagatgaagaaagtataatcactagggatgagtttaatttctttaagaaagacagatatcaggatcctctaataatacattaaatgcccactaaagtcagaggtatgtatttgacatgtaccttactatattcttgtggacaagaaggagcaatatggattaggtaatggaataatttggtaaattatttaatggttaattgatatacttacatattactaacaaaatggttttaacctgaaaatttcatttttgtttatattctggtaacattatcatcagtgttttagacatgttcatctgtcaaacacatgaaaaatgaaacaactctaaggattagctaataggttgaatgataaaataaaaacctatatagatgtctgtgcattacaattatgaaacagcttttagttaataaaactaaataggaaagacccttaaatattacatatttaacaataaaccacacacacgtaatgacaatactaggatgagagacatacgttttaaaaagcaagattttactacaacaagcagtgtttagctagctatactgtcaaccaagggttggcaaattatggcctgcaggccatatccagccaatagactgcaataaattaaattttattgcagcatggacacactcattcatttgcgtattgtctataaatgctttctcactgcaacagcagagttgaacagttgtatagagattatatggcccacaaaacctaaaatcttagcctctttccctttacagtaaaggtttattaatcctgcctaaaaacaaatttagcggaataatttggttacaggaaaataatgatttttctcttataagtttaatgtctggacaaggttaatgagagctatgtttttctccaggtagagtatcctggacgtgcagtttttatgcatattttaacttgaagacactaaagagtgttcaaatgtaggatatacaaatgacatagtgatttaaaatagtagtgtcaactgtggctaacaaaactaggaccatgcttttcctaaaaaatggaggaaaatggcaagataggatagttttggcacataaattgcatcacatttttgagagtgtcatttgaaggcatggtttagtctaatcttggtttatctcaaatgtaagttcagtaacatggatgttacagcaagacataatttgactctaaatcagcaagtacttgcaaatattcagaactatctggaagtgaaaacggcttcctctgtagacagacagcaagtttcttatcccagagccctgtaggtagaccatctgtgcaggttataatcaggagattcatgaatgtgataatgatgacatagtcacattgacaatgaggcttttagtcatacagattaaagtaaatatatactctattgtgcaaatctcctagtaattgaaaataaatttaatcttgtgctacaagtagatacaaagtattcccagttagattttacatgtatacattttgaaactattaattttttaaaaataatgcaatgactttttaaaaagttttattgattgattgattgattgattgattgatttttatggagtctcgctctgtcaccgagtttcgagtgcagtggtgtgatctcggctcactgcaacctctgcctctggggttcaagcggttctcctgcctcagcctcccgagtagctgggaccacaggcatgtacaaccatgcccggctaatttttgtatttttagtggagacagggtttcaccatgttggccaggcaggtcttgaactcctgacctcaggtgatctgcatgcctcagcctcccaaagtgctgggattacaggcgtgagccactgcgcccagccaattttctcatttttgatacactaattctaaagtaaactttcccctttattacttgaagatttatttcaggtgtttttcaattcttcctaatttcagctcctcaattgaaatttggttcacattaatgatgcttatctgttcttgacacatagaaaatacaaatataggacttttactgaattctattttttaaaagttctaaggaaaaagctattacatccacatatatgtgtaaaatgaaacgtagacctaagagctactgtgaataaacagcttgacttttaataaaagagagtatattaaatttatgttacagctaagaatctgggaattcttgagtactgtctgctaggaacactattatgtcaaaaataacaaaaggggttatttgacatgatttgctgatcactaaccccactgagggaagccctccaaggtttatgtgagaagtagtcagtttgtttttgtcttactggtgcagaagaaatgctttttattgcccatgttctccaaggatgacactgagctccacaaagcaaccactggggaatatcagataactagcatgaatctattgttataaaacaagcacgctgttttaaaaacatatttaaagtaattcatgagttggatgtttcttgacaggtatacttttcagtttaggtatttaaaaagaaaaagtctgctgtgtacctttattttcacttttactttggttgttttttttgttttgttttttgagacagagttttgctcttgttgcccaggctggagtgcaatggcacgatctcggctcactgcaacctccacctcccaggttcaagcaattcttctgcctcagcctcccgagtagctgggattacaggcatgcaccaccatgcccggctaattttttgtgcttttagtagagacggggtttctccatgttgaggctggtcttgaactcctgacctcaggtgatctgcccgcctcggcctcccaaagtgctgggattacaggcatgagtgaccgcgcccggctactttggtgttttgatgtctatagaaatgagcagtttctctacttctttcccagaaatttatctccaatgctgacataagcacaaagaccttatgtactgtgctgggaaatattttgtgtcttaagaataaaaattttcattagagttagtccatgcatcacacatattatccttcctgataagaggaacactgaagcacagacactgtgttgggctatagttcttaatggaaaaattaagcttttcaaaatgttagtcactgccatgctagatgtttaagtcatttttacaacctgttttgatagattctaagaatcagtcttacattatattttctgtggcttactgttaaaatcttattcataaaaataacggttgtgcatagaagtagtatataccaacatcataaaccagaaagtaatttatatttaaccctcataacaatacttcaaagtagaaattacctcatattgtagaggaaacacaggctcagataggatataaattgcccatatcacaaaattagtaagtgatggagctagaatacaaacaagatctgcctatttacacaaatcaataatttttcctctatagcatgttgtcattacatgcctttggttttcaggtgaaatgcactcaacttcacattttaaaatatgccacaaatgtacccataaagtaagtgaacatgactattgagtgggatcacaattattaaaaagtttgccttgggaacaaagacagtatactgaccgtcagggaactgaattccataaccaaaggggacatgtgccatctccctgggctcaatggggttttcccaatggattctttgtaaataggtgttgcacatatttctgtttctttaagctttcctttataacttccagacctacttctgatggtgttgaatttctttcaaaacctcaccctagatatggggtcagctttaggcaaaactgagagttgctagctaacaaaagtagctaatattttaatgaaaagtcttattattaagctaaatgccaaacgctattcattacatgtattaatcaattatcacaattttatgaagtagatatgaccatcatttttatttatcagttgaagaaactaagacacagaaaactcaaataccttacccaaagtcatattgcttgtggagaagttggcaattcatcttggttatcttgacttagagtctgcgtgctggatgactattttagactgttacgtgtgcatgcagagctcagtgtttgtctggtcccactccctcctacccttctgtcccctagtgacttcatcctgttccctacttctcaagactactccttttcttagacactttttcatatttcagaactaatcattctgtttattttttctctgctcatcatgccaaagttagcagggcagctgaaataaaggaattcatactaaaaaatggcatgctcaatttgtaaaattttccagagttaaatagatagagtgaaatgcgcaatttcttctttgaagaaaacaatgttgaattttacttaaatgaatgataaatataattttgacatgtatttgtgatctgtatgagtaatatcatatcctatcctgcttcacattctcacactcttataccattaatgatctctacatctatccccaatcagctaccacctctcttcctcagctgtgttatgtcaggtctgaaaattaaattttaaaagtagttcctaagttttcaacattcttaaagtttttttcctggaaggacatgatgagtaacctgactgtcagcaaatgccttaggtattaaggagaacaatcataatggcaatagctaatattttttggcagagccaagtttcagtatctctttgcaactctgtgacatcatgatcatattaattcttattacaaacctatgaagtggctatccactttattttaattttataagggaaaaaacaagtccttagagagtctaagtaacttggctctggatttgaacttcaatctagctatctctataacttgacctttaaacattataccaccttatatgtcaaacttaccttgaaaaccaacaagtaaaccaactaaataaaacaataagaacaacctataataaaaagccttctcagctgggtgcagtggcttacacctgtaatcccagaattttgggatgatgagggaggaggatggtgtgaacccaggagattgagaccaacctaggcaacacagtgaaaccctgtctctacaaaaaaaaaaaaaaaatacaaaaattatataggtggacatggtggtgctcacctgtagtcccagctactcgggaggctgaggtcgaaggatttcttgagcccaggaggcagaggctgcagtgagtcgagataatgccactgcactccagcctcagcaacagagtagaaaccatttctgaaaaaagaaaaagaaaaggacttattatccaattcagtatgttctataacaataaaaaaaataccattgaatgaatggggaagaaaattagatcaactgctgtgaagtaaacttgtttactcctgatcaagaagtagcagcagattatacctctgtggtattagtaaaatacatctttgcgctaggcgcggtggctcatgcctgtaatcccagcactttgggaggccgaggcgggcggatcacgaggtcaggagatcgagaccatcctggcgaacacggtgaaaccccgtctctactaaaaacacacacaaaaaattagccgggcgcggtggcgggcgcctatagtcccagctactagggaggccgaggcaggagaatggcgtgaacccgggaggcgaagcttgcagtgagcggagatggcgccactgcactccggcctgggcgaaagagctagactccgtctcaaaaaaaaaaaaaaaataataataataataattagccgggcgtggtagcaggcgcctgtggtcccagctgctcgggaggctgaggcaggagaatggtgtgaacccgggaggcggagcttgcagtgagcggagagatagcgccactgcactccagcctgggcgacagagcgagactcggtctcaaaaaaagaaaaagaaaaaaaacaaaaacaaaaaactaaattctggcagctggggtaaaattaatataagaaaagaatagatacagcactcatttttctataccccaagtgttttaattatttctatatttggaaatgaattcataatatattagtcacattatttgaaatttcaaattataattttatttgtttcagataaaagcctcgtcctttaaaaacatacgtttggatgaataaacaaagcaagctttctatgactttcatataaactactttctcatcctgtattgctccattgagttagtgaggtcagggttttgatagaatgagaatattcatacagtgaattgcagacatatttgcaggtttttaaaaatgatgttggctttgtctagggctgagggtgatgttgcagggcaagtgtaaaggacagagtcacacagagactcctgagaactagaaagcaaccagtgagtgccagcatctgaagggcaaggaagtgtcaacgtagttccgtataaatttagtaaaacataaggcaagcacccaattgttttccaacacaatatgctaattggagtggcagaattgtatggtagaaagaacatacaaatgacaaatatattcacaacactgtgccaagtgcagtgagaggtacagtgacataaagacatgcattttcagacattatagtcggtttgaggatttaatatattaatcatgtacagagatctaaaatttccttgagtacgtattatgcatgctgaatggtaggaaatgtgtgctaagtattttattctggattctctcaaataaaactgacctcatagctctgagttaagtaattttatatttaccacataagaaaattgaagtacaaatgaggaaatcgaggtacagacagattaagcaacttgtccaagactatacagctgctacgcagagcatcagggattcaaatctaggaatgagtgaagaattttattactaattgcataagtaattacatacgtctaagccagtcatatattctttgttggttctatgacccaatattgcagaaaataattatagaattggattttctgtttgagtacaaaatttgcttcacaaaattataattctgttgtttaaatattgaatgtatagtgtgaattgttatctaatagtagtatctgttttaaagtcacatattggtaaacattgccttaataatgattatggttgtcagcacatgttatatcaacgaatcctttcaaataattaatgtggtaagtgtagaccaaatcaactgataattagctaagcctcagaggatctgagtactgtatctatatttacatggccagtgagtagagaggttgagtcttaatcccagtgatctgacagcagtgatctcatttgtgtgtatgattccagaatcactgtgagagaatgtgaacccatatttagacaatgcatagttcccagcaactactagagtcttatcttgctctgggagtgcagaaaatacattatgataacttggtaatattgtaatgtgaaaagcgtaaagagaataactcacaagaaaaatattaagaagttttctgaagcacacttctgttgtggcttccagattaatgtgctttcaaattctaagcagtgttttccacagacagattttctgtgtaagcagaaattggcttaatttaaggagatacaaaggatgttacagtattttgtgtttactacagagattggctgccatttgttagtgcagtaaaattttgtaaagctgctcctcatgagattctttgaaattcatttataacaacgagactggatacttaacatctgctgcaaatgttttctaggagacttagttactcctgttccctactttctgtagtttatttccattctatgattgtttatcttttgaaataatttcaacaattgactctgtttaatttgtctggttctgagaaaacattagctagatgacaaatttaacagtttaatccaacaggccttgagtggtatatatcggcatgtgttaccaaaggagtcaagaaattaactccagctcttaaacattgaaaaaagaaaaagaaggtaggggagggaatcttgatagccactttggtaatgacgcaaagtgagagaaaatatcatcctggagctcaacggtgagcacacttaatggcaaaagaagtgagaactgaccatctgctcatccacatggtgagatatggacaaatacctcttcttgagaatgaatgagtggctatatgaatgaataggtgaatgagcaaatgaaggcctatctgtgaataaccaaactggaaacccacagtcagtttacaagcctcttgaggatatgatcataacttgaatatctcactgagagctaaccctttatatgaacttagctcatttacttttgcatttgttgttgaaggtccttcgtaccctgctcaaaggctgaattcttaaaaatatactaccaccattaaaaaagaacacaagaaaatttttggaggtgaataagtatgttcagtaccttggttgtgatgatgatattggtccaaactcatccaggtgaatatatgaaaggtgtacaatttttttatacctcaataaaacttctaaaaaatgatttaaaactaaacaggaacaacagcaaaacacttaggaaacaacagaagtttctgtccctgttctaaatgttaactttaaaggtttgattaggaatttattttttagtgcagaaacatgattttctttttcaaaacacaaacagatctagttaaaatctacacatttcccttcataaaggcagagaccctcatgcaacaatcatctttagaaatagaggtccctgtaaaaccacagtgcatggttttttgactgtttatgcattaacagcatttttttgtttctagccttggaaatacatcagaaatagatctcctgactgtgtttgcatgggtcccttagaaatgacttaaatataagcaaaccatattacttaaacaatgttaagctatgctgtagcgctgtattactgctttgagaaattcatattgttcaactaaatattgtaacagtaattcatgttcatagaaaagtcaatcaaaggttttcacaagttcgaggcaggaaaggaaataaaggtcaggcattgtattgcaagttccctattctaaattgtagttcttacaaataggctcctgaggttccatagctttagcaggactcttacatatgccttcattgtctcttctttcaatgacattcagacatttatttctttctccctcccattgtgtctgactgcctcacactgttgaacttgtgcctctctcacctcttccttctgtctctctttttaataccttgatgcggctgcaacggatggtgggatgcattttattcagctctcaaggcagtcagagttccacttgagttcatgtagcatctgttataacagggttaaaattatagaaagtacatgattttattccctttagctgaaggacaacaaaggtggatttccgtatttccttgtaaagtgctgcttccgagaaagcacattttggtatccactaatcccaagtaaagtgacttggttcctaatgttggttttgccattagcctggtggttttgttaggttatttattttctttaagcccatcaacccttcagttagtctccattctgcctacttgttggtgaaatttaaaaggcctcctagtagctccaatagttacagtataatagaaacaagcaaatactcgttttaaaaaaaattctatgagggtaaaaacacttggattcaaaagtgagtttgaacaatatctaccaagtggtaattaggtatgctcagacttttaaactaaaaatacaccacaagactactgcacactcctactaaggtcccaaggattattgaaaagtagaaagaaaaaaaaatagtgggaacttcttttagttaaaatgcacatcttatcagtattactataataatagtaattgtgacctttagtttgaatttcttttctggaaatataaagtcttagggaattgtgatataaatcccaaggctaaaataggtgtccactgatcattctgatttttatttgataatagtcttcctaaatagactattattcttataaaatggaaggagcaagttggaaagcttaagaaaactctgaagagcaggcatttctaaataggaagctataggagaaaaggcttatgactatccaaagcacttaggcatctggtgtattatatggaatgtctttctctttttcctcaattatcagaacaagttcaatggtattaaaacaataaaaaatggtcttagttggattaaataggccttcaaagggctctctgacagatacgctcatgaaattatgacataactctgcaaactgaatctatgtgaaacagaaaacatgtagaagacacaaaattctaagggaaactcaaggattttctaagattgctttacataactgcttctgttttccaaactttaccttctctaacaacaagccatgatataccagcgtcaaagtctagatagtccaatggcaagaatgctgacaaaggtagttgtataagaatgagtcatattttgaatgacaaaatggttaatatcttctttcttgcttttttatattggcaattttttctatgttttagaggaattgagaattagaaggttatttatgagcgtaagagtataggcaaatttaactcaattcattaaatagttattgaatctgcaaaacattgtggaggatatagaaaattgttacaatatgcatcttatcctcaaggagcgtaatcgttttatttcagctggagttttttaccacttagatggagcttagctttactgaatgtagaccttaaacactctttatgccgagttttattagcttgggtttatcgtatggccgctgtggctggcacaaaatttaccaaccataaatattagtatagtttagtcatactttcacttattacttaaaatttatcactgctttttcccatgggggtgtggttgagcaaagtgttttgagctgcgtttatgcgtgcttgatacctgctcccttcgatccaggtgatctggagggcattctcactggggcggggatgcttgcatgtgtaattttttactaagaattcaaaaaacaggccaggaccaaacttctatgtttaccgggttgtgcggacccatctaggcattttcagtgccttgctttaaataattaagctacattaactgggtgaaaaacatttgagtggtattttgaaatactagggggatgtcagggggtaggatcttgttaggtataaatctaaagtggtcctttacagtcctggaagtttagggcctttaaaaaagttgaactagcagaggttttcgctgaggggccatttgtagttgaagttatatttgatttaggactataatatctgggatacaagcttttcagagcgggatacctgaagtattatataagtattaggacagagatttagttagcatcgaaataggagattttatttggttggagaatgttaggattttttagaaaattacgttaatcgaggggctagggttggagtgttcatggttaaattatgatttttagggctctgactaggttcaatttaagtatcttgtttttgggggctggcttacctaatttaacaataaactcagagatggggggagggcagatctgcggatttaatcggaagcactcctttaaatactgcgtgaacgtacgtgtgtgtgtgaacgtacgggtgtgtgagaacgtacgtgtgcgtgaacgtacatgtgtgcgtgaatgtgtattgattattatggccttcaagcatgaatgaattagcaccttatggtttggtatgttggctcagaatattcaagataagtccagctacagtcgattccgcagggatcaggctcccgccgtggtaagtggcagcatcccgaaaacaaaaacataccaaatgcatgacagtgctcccatgactagttattagggtgatagtcactagtacattgagatataaggtttgcaaatattttctcccagtttgtaggttgcctctccaccctccaccctcctgtttcctttgctctgcacaaggtttataattctaagtaatcctgtttatctatttttgcctttattgcctctgtttttgcgtacaaactaaatcctcaaaaacctgtattatcatagttataagatttattttggtaagattccaaatagtttaaaatgcttttgtttgtttgtttgacataatggcatcagatataacatggcataatgtcataccgttactctttcacttaaaaatcgaaatgtaaacatttttaaatatggcaaaaatgtacattagaaatacattaaatggtaaataacaaactgctgttaatcccacatataatcatggcttacttttataatactttgaacattataaagtgattttctatctcttattatattttataataacatgtgggatagctggagtagatattattttctctgccttacatgtgccaaaaacgagagagggagagaagtgaagtgactttccccatattgcaaagacacaatggtgcagagctgaaactttactgattatttgaaatactttacaatttttctaaaacatagtgagatctaggttcttagtgttataaccagccctatttgaaaatttctcaggatattggttcatcctttattaaaacaaacaaacaaaagtaggatcaagttaagaaaagcagaatgttttggtaggattaggatctcaaaataattatctgaagccaataaagtgtcacattatttttcttgctttatttttaattctattatttttcctgtgtctatatggtgatataataacctgagaaagacggttctaatcacacatgtactaatcacaaccactcaacataattttaaagtaaaatttaacccggatgtaaatttaaaagttcttaaaagtattcaacttctgtgtctatacttaagactccatccctaggtgtccgttgattatgcaagtaggattaacaataattaatttatcaacctaatctttaagcagtgcaagcattattattagactttcttaaatgggcactataatatgtatcttgattgagcttacttatttcatagaagaatggtatttctaaaattcttttagagatttttgatattcaatctcaaatgtttaatatattttccaaaattatcaaataaggatgagcactagcatactctaatatttacaggaaaaatataaacaaaaacacttggatttctaggttctttaataatctcaatgccaggatgaattctctaagtctgaaaaaattgccatgacttggtactaagatcagtatcaattcaaccattatttatttaaaaaaaataacttaaataaaagttgcatttaccattttgtgcagtggttctcaaccctggttattcctctatagttttaaaaaatgctgatacctgggtccttggcccagtgattcagcataaattagtctcacatgtggctttgtcatcaggagcttaaacagttttccagtttatattaatgtgcagctgaatttgagaacaactgctttagtcttttgaaatgaggccaggtgtacatataaggccttactgtgcaaagatttaaatttgggggacattttggtcatataaagctggttaatacagatgaagtttaaaagaaatagactcttacttaccagatatactaacactttgcaggaatcaagatcattttgagagaattaaaaagaagagaaaaataaacttcctgaatcctgaatttataattacatgttctacctttctcgtactataccatcttgattgatgcttagaataaaattccaaagaatctgaaacagcatacaaaattatatttgtatgattttcatgttcaacatatttcagtgaatttcaatgattaaaaattaattatccataggtgatatatatgattattccattgccaagactgttacattaagtaaggcagctagttcccaacagatctggaaatcaatgttgcaatctgaagaaggcttttaaagtcaatattcttaggtacatatataattttgttataatctccatattattgcaattcaattctacagaagacctttcttgtcacatcaccagtccagtgacactggtagagtgtatcaaaggaaatgtgaattgtcctcttaaacttccaaaccaaataatagagtgaattgatttatatttcaaccttgagtacggaagacattaacaattatgatccatagtaaaaatcctgtttttatgcagtataatttattgagactcatttaaaattcacataacatttgattgtatggaaggtgtttacaattgtaatttttgcaacattgaaaatgccaaatgtgtttgattaatatcaacttcctgcagccacacctgtgtaatatttatgcctctaaattactatttgtggtaattagcagtttttccattgcaattaacaagcttcaatctcgaacattgtctgagatagcttaactttttacttttttcttagttgaaatgttttaattatagtttaatttgttattttagttttccttttgtcttcttggagtttaacctcaataacattttgagttggttcttatttatttgcatcaaaccactctaaaatgtaatacaaattattatcactccagctacatggaaaaactttaacaaacctgtgaatgacttaatcattttaacaattaagacatttacacacacacacatttcttctaaaaagaatggttaaaactacctatatactggaaacatattttcatataactttgcttattattatttgtatttatattgcataaattatgtcagtagctagaatgacatggatttgacaagaatagagaaaaggtggtttcatatcccagactcttaaaacacacttttcagtttaggacacaagcgctctgaagatatgtatatagtcttcatgtctggcatctaattcctatgagtttccttcaattaatactaaacacatgtatagaaattgccataaactgagctgtatgatggtaataatccccaaatgacaattcaatcatccagatctttgggttgtcctaattccattatacaaggtggatctaatggtcattagatccctagatatgagggatccctagaaaagtattttcttaatcttggataatagttttcaatgctttagtgaaaattgcttatggaactcttcgattttaatcaatctttgaaaatggctctttcaatggttgataaggtaagtcatcacacagtacttctatattgtaaaaaaaaagctaaaacagtaatcttaatatacattaggtattaaatacctcttatttccagatgtatacaatagattccttttatatcttagagttaaaaccagagaaaaaaattgtctgtctccataaaccatgcactctcttttgttagataaagaaaaaagtgtaattcatctttatcttctctgatctattatgtgacttttaattttgattttaaaaattgaacttattgatttttttcttgatacataaattatacatgttcagtgtctatagcgtacattaaaaattgtttaaaatacgtataatctcagcaaacagaaaatttatttttttatttaaaatattacctaacattttaattttcctaaatatcaaaactgtcttattagcatacactctcaaaataaattttattctatcttctttaataacataccagtttttcctttatatgtattttgaacatatatttgcttcactaaatgctattttaaaagcatggatttcatttgttagtattccataactagcaattataaagttggacatttagatttatttcagttttcaatattcacttctaaagaaaggttacaatgaatatttctgtaattaagtctaaccacacatgcaagattatttctttagaatacattttagaagtagtattagattaaggcatttggcttacagttttaaaatccctttagaaaatgttctgttattataatggtctatttttgtatgccttgtattataatttgtatcaaatatatttttatatgcatggtatatataagaaatgcaaatctaattagataaagcaacaaatatattacataattgtgagatatagtctttaaagttaatatatctgagaagtctcctttttcttttaatcttcacaaatgttttttcttttgttcactctagaagattttgatgtattggttttgaatgaccaggattatttcagaaggattaaactaataaaatattataggcaacaagagcagtgaggtgctgagaggcatgtaaaactgtgagcctatagcatttaatggaaagactgacagaagggagctaaaaatatatattttcggtaccagagcctacttttacaactaataatgctgaacacagcaaacttgaacctatttaaataattaaaaagccttaaatatgaatattgtcaatactaatgttgattttaaatagaattcaaacataattgagaatttgcttgacaaattatacaacctgcatctttactatattgaacacatttatgttgaagtattgtgattataaaaatgtttatcttgaatatataattttcttctcttgtataacatgtataatgtatgtagtaccattcatattagtatgtttcttccttgttaacaatacaaaaaaggtacgtatatgattaagtctttttctttaagagaacattcagaaagcctaaaaataaattttaagtgaaacactagcaaaactttgacctttattaaaattgtacttctgtccccacttgaacctggttctgtagtttagattctgattttatttgtcgaaagggatgcctatgtactcaatgcaagtgacataacatccttcattcaataagaatacaaatgcatgaataaatacatatctattgcaaataaaataaaaataggagagcagataattattgaggtataagttttttactaaagtacaacactctctagtcataagagcagaaatatatttaccagtatagcatgttaataatgggtatttataaatgctgccaaccatatttttaatcaacttaaaaatacatttggtagaacttaagtttagctgcataaatgagagtaatgaacttagttacagatttttggacacatttgccactttaattaaaaagattagtaatcgtaacatttaatgctgctttatattttcaaaaggattagttcaataatgattataaatttccctggcatctttgcaattatcatcatcctcaaatttatagatgagggaattttcagaagaaagttaagtactaggaatagattttgaatccagtgggtttcagttacaagactgttacaagagtatgagtttataaatagtttccaagtgccaataaatgccagtggtggagataaacagaaaaaggtgattttatcacacctgatttaatgctgtttttcttttatatttcaacagtcagtggaatcttggcagtaacaaaaagagaaacaaaatttacattgttaacagtaccgatagagtgacactctttatcacagtttgagagaaacttcaagaagtaaaaataggagatgtagtctacagacacttaagaaattcacattatgccagaaagactaagtagccattcccctagaaattgaagaaaaatagaaactgggtttgattaaatgacagtatgagtgctacatataagacattttctagcctttcagagaaggaagttaagagtacatgaaaagattattactgttcctgtttgcctttgaagattacagaggagtacagtcagcatgcagagacaatattgttgtgacttacagttttaacaatgaattctattgctagaatttccttttttaaatgttttctataagagaattcttacagttctgattattatttccagcaagaaccttagaaccttatgtttctgttaggttcttcttaatcacgtacactacgaggagatggagggaatttcgttattctattctaaaacatacccccttccaatttaaaaatggaacgtttttaaatggaaaatggaaaataataaaatggtcagtcatctaaaccatgattaatggattctctagaacttagcttcttctcttccttcctctgattaccttcctttgcgcatgtcacagctcctgatgaacatagacaatagataagacaattaaccacattaatgtttcaaaacactttattatttgtttaaaattacagtttgaagctaagttggggaaccagatgccacttttacaagggtaaataataaatggtgtgttttaattatgtatgtggcccaattatcatgagtaataagtgaagcaatatttttaaaggttaaagaagttctgtatatattagagtggagaaactttaacgttctaaaactgaataaaatctttccttaagaagaaagattttgtattcaattaaatattataattagttacaatatatgggatatctgtcggaaaaaattgagtaatctactttctcaaagttttatttaaggatatttctttccacattaggtagttcacagataatagtggttttgttttcacagtctttcttgtcaaatcaaaattcatacagcaattcatgtgaaaaaagtgattgactatccttttacaatttacttgataaaatctaagtagccaagaattcaagcctagaagactctgaccaatattatcctttatgctaagaaataatattccaaacctatttcttaggctattaactgccatttgaccctttataagctgttatgtttcaatttattcaaataacatataattgtccaataagtttgcattgcctcagtaccagatctataaaaggttaatgggctttaaaaagggaagaaatcttctgcaacaacacggatgaacctgggagactttacgtcaagtgaaataagccaggcacttaaaaacaactatgacataatctcacttatatagagagtttagataagtaaaactcatagaaacagacagttaattggtagtcatcagaagctagggcatggggaaattgcagagatgtcggtcaaaagacacacaattccagttagccaggaggagtaagttcaaaaaattgattgcacatcatggtggctacggcgaataacaatacatttatatttgaaaattgccaatagagtagattttaagtattctcaccacacacacaaaatatagtaagtaggtgaagatgttgtagaggcccaaattcgggctcatgtacctgatgctcagttgaaaccaaacactgacacaccaatgcttggggatagataaaagtttattccatttggccaaagtgagaacggggcaagatctctcagacatgtcttaacaataagacgaagcagagggggccgggtgcggtggctcacgcctgtaatcccagcactttgggagaccgaggcgggcggattacgaggtcaggagatggagaccatcccggctaacacggtgaaaccccgtctctactaaaaatacaaaaaattagccaggcatggtggcgggcgcctgtagtcccagctactagggaggctgaggcaggagaatggcgtgaacctgggaggcggaggttgcagtgagccgagatcgcgccactgcactgcagcctgggccacagagcgagactccgtctcaaaaaaaaaaaaaaaaaaaaaaaaaaatgcagagaggatatttttgcagctagacagtaagagagggggagttttagggaaccaaggggaaagtctgtgtttctttaatctctgataatatcctgagcaaccagacttctgggcctcagcagttagttgcaacatccttataggcattcattccttctgcaaatgtttttttgttaccttaaagttatcttctcctggttgacaaagaaatagtaaatcagcagtttgcaattgtattgtgagaacaagggatgttggcttttatgcaagcaagcaagggcctaattcgaatttttgttatctcaatcactaaaaatgctgaggtattgacacctcaaggggtccgattacaaggtaatgcatataatgcgtatgtttagcttgatttagccattccacaatgtatgtatactttaagacatcatgtggtacaccttaaatatatacaatttattttcagttaaaaaataaataattcaaaggaaaaaacattaattggaagactcacaaagatgagataacagggaatgataaagaagaggaaaaatgtcaatatagtttcaaataatgaaacataaaaaatggaatcaacagtggtgctttttgatatgatcttgaaagttagcaaaggaaaaaaaatacatgaacaatctagatttataaatattgatctagagacacagcagaaaatagttcagaatatgtttgaatataagagaatattgttaaatatcagtttggaaactttatttggaaaatattaaagtatactgaatagttcaatacttcataacaaaatttctctagaagaaaaatatagacagaaagcagccaaaaactagtatttgaaccttttgaagtatcattacaactaatgttttgtgtactattttgtttttggaaatgctgggcctaagaagaatcagaggagaaacatatgaagcctttttacttcttttttttttttttttttttttgagatggagtctcactctgtctcccaggctggagtggcagtggcgcgatctcggctcactgcaagctctgcctcctgggttcacgccattctcctgcctcagcctcccgagtagctgggactacaggcgcctgccaccatgcccggctaattttttttttttgtatttttagtagagaccgggtttcaccatgttagccaggatggtctcgatctcctgacctcgcgatccgcccttctcagcctcccaaagtgctggaatcacaggcatcagccactgcgcccggccacctttttacttttaagtcaggtgagaaaaaaatctgccttttactttgtcacgggtcccaaagaggacgagaatttaaaaaaaaaaaaaagaagggagacctgatcatcagagcatatacagtgttgtgaaggcagatgtagtaaaatatattatctaaaaaaggactgaagaaactgaaatgcaacctgctaatgaagataggtatggaaaagagatatgaaataagtgcttttggacaagaagatcacaataaaaggatttctgtgaaaagactaaaaacacaaagtcaaataaaatacatcacagaatgtaaataatagacaccagctgcatgggttttaagactttgttgaaggaaaaatataaaactataattaagaatgagattctagaaaaataagaaacatacagacattcagcaatatctaatggtttaatttcacagaaaaaaattaggcatttattagaaagtgtatttataaggaaaccatagaatgagaagaatccttgaccctcctcaactttaacaattatgatacatcaaattcacttttgatggcagaagtgatgatatatttttttaaagtaacctagcctaaagtacgtccttaaccactatcatttagacaattttttacaagcccttgcgttgtgtacagtagcaagctcataagtggaaacattgggcatttagaagcaaactggtgatatggaattttattctctttttttctgtttttattctaaacaaaattttacttctacctcctactaagaaagatctccttatattcatttcctatatggtttggtatatgaataaagggtgataacaaatataaactaaaagatgggtaaatttttacatacactttcatagcatttatagagtaagaaaaataaaggaaagcaaaaaaactacaaacaaaacaattgagaagtgaaagtcaagggctttgactcagaggagcagaatgctggggtgagaatcctcatgacatatgaaaagaaggaacccagtacacacagtagacaattggcaattgagaaaaggagaaacatctccatggaaacagtacagaatgattctttccttgaccttgcgagaaagaaatctaccgtaattttgtcagactaagtaaggatttctgtggccatataaaaatgtgtaatgcaatataagaaagtactttcctcacatgtagttaaagatggatgattgttctgataaaaaatatgcttacagctaaacttgctgccacagtttaggaaaataaatgccaggcactagactaaaccaaggtgctcatgccatccctggcaaatagtaagctcacagtcatctcaaataactgcaagattaatagatgtttcaggaaacaataggtaagtaaattagagaaatggataaatgtgtaaagcttctatgctagtttatgagtgttttagcttagagagtgttaggtcaggtcagtctgtcaggtacttctcacaattgaaactgtataaaattaaaatactcagatttcagatttcagaaaaaaatgtgtacagtgagatgtgatgtacagaataaaatccttccatttgaaggaatatataatgaggatacctagaaaatggtctggaaagaatgttaataaattgatgctactcttttatttgactactgcaggtcagggagcatggatcatctgtgagcatgtctacaaggaggacaaagcgggtagtactatggggtctcttgcatgtaccatgcacactatagtctatgtgaatgctgcttcccagaatcatgtagtgtacaatcttccctttggcaatgggatgggtaatggttatgatgtgaagcaaactttttctttataacctatacattttttttgtttttgcagcaagatttttttcagataccaattttataatgagtgagaatgataatgagggacagaactaccaggtaaatattcccccacgtcttgttgttgtataacatagacatcctgaattagttttaaaaagaatgatgatttttttttcttctcacaacgctattattttaaggaggaaggcatgtgaagactttgtatatagagtcaataagaagattttaaacacgtgcatgtaaacttggccgacaagaggcacttggatctagagagactggcaacatatagcagaactttagcatagcctagagctctgttacagaaattatgagctgggagaagagacaatggtgagctgatggaagtcagagcagccaggttaattaattaggactctcaataaacactagaacaaaaataaagaagacagtaatccgctagaacaaaatggaaaccaaggagtcactacccacccatagacccaataacaatagatgacaatgtttgataagaaaattagaagcaggagagaaattagcattttatgaaagaggttgtagtcagttggacagatggatgtttaattcttgaatcctctatttacacatgctagtgtatcttcctctctggatctgtttccatataagggatataataattattatttcatacagacattttgttgtgttgttgatacatttgtgtgaggtacatgaataatgtatctaagtgtcttgcacaaatcctggcacataaatgttcattaaatgatgggtctctaccaacatccaatatgaaaaaatatttccatttcccaggggcttcagaagatgagtatgaactcatcttagagttgaagaatgtatcagacaggaacaggtcagaaaaagatcccaatctatgtatgtcatgtatttagggactcagaaggagacttatctcatgattagatggtgtgcatgggcaaagaaaggaaaaaaaatgctgctattttcataaaggctgaaaatgcaataattatgggaaagttgctaacaatgattttagatgcttgtcaaacctaaacaggaggtcaccagaaaaatgctctaaatctcttcactgtgacatccacatctaacactcatgcccttatttagcataattttacctggagctctattgtcctgagatcctagaaaatgtagtgtctaggtttctcccttgtaatttaaacaatacttcagaagttagaagacatgagtggataacaggaaacctgttacaggatacaacttgattaatatagatataataaataatggtgcttcctaacctcagttaggataataaataatacatgttccagttaaataataaatgttgtagtctttattacttgaatttcttacaagacatttaaagttcatgaagacagatagtagatctgtgtattttaatcattttttaagcgtccagaacttcagttaatcaaatcagtaaatatttcttttcttaaaatgaaacaatctgcacatatacaactccactctgaagaaaggcaattattttcataattataggaatttctgcataattatgtaaataattgcctttcttgagagtggaattgtatatgtgcagattgtttcattaaaaaaatgtatttattataattaaaaaaggctttatatatacataaagcctttaaggccttttgttttttttaaaaaagaagactgtccctccaaaagtggcacgtagttctacctgttgtataatcaacactttactaatttatggatttaatccactgcttatccccaagatttccgagatcccaagtccaatatagtcaaggctcaagatcaaagtacttacactttaccctcactacaccccttgccttttatactccaccaaataccacctcccagaagttgctgtaaaaagaataatttacctacatacatgaccattaggattctgccttgaagcagacatgcaggaaaatataatattccatcccatggcaacttttctttacttgttttgttgtaatatttttgtgtaccctaagaaatagtcattttaatagattttcaattatagactaatatttatcagggattcattataaaatatgctatgaatttccttgatggtgggagcagatagagaggaatatatggttccatctcttgaacctcctctgtgctctcttatctcaagtttatttcatcagtcaattaatctgcttctgttactgtgtctctagctccccctgcctttccctgtctctcaagcactgtggtttattattccttatcactctaataataaatgccagaagctatgtttcctcactaagacatatcctgggaagtcaataaatacacgttaagaagacaagatttctcaactttgttaagatacagatttctatcattaacaattctgatttagcaaacatttattcacccccaatctttctaacttagtttatctcccagaattctgcggccacaatttggtgtgtgaataactgattgaacttgcaacaggtggtgaatcattaatggcaatgtcaaggcttaaatcttgctccactggttcacccatggctgctctcacataccaagctagagttcaattagaaagttggagatcagtaactccagaacactggccagagggtcagaagagctgactcgtggacattctcattgtgggtaaaggattcattgggtttaatagcagtttatgtcattcttttctaaaaattagcagtaccagtagtctcatgatttaggtaaatttgctgttgattggggtagaatagtagaagtatattaataaaaatgccttttaaaaattacagagtattctttgcactgctgaagtgattcatgaatgagaaattttgaattactacacattaatattttttctagctctcatacctgtataagtctcagaaaggacagaagtgaacagagatgagaatgcaaccctctcttagcaaatgatcaagcgattgtgtattgttcaatgattaattgatattttaaaatgtttccaggaagactaaaacactttttgagaattatgttcttaattttatactcacagctactaaagcaagagggcttcttagtaacaaattatttttacagtaatcaaagaaaggttaaaataagagagtaagatacctaaggccacatggagagtaaatgtcatagctggaaatttggcaatggttttgtgattctcatcattttctattttgttttattttgtcttgtaatacagacttctctgaattattttatttctgacagagagtaatattagactaggcctttatttttacaaagcgtatgatttgtattgtttactaaataggtagataaataagtatggaccaaaataatgagcagttatcataaatgtttacatatatagaaaattgttttttaatggataacctatataaaataactttttaataaacatgtatggttcaagaaggacattttaaattaaatgttcaatgccattttaagaatttgattctctaaagaatatccacaaaatttgataccacattaaaaaaaagatgccaaataaatatatctagaatcctctagaatttatttattgacgaaatcataaggaaaagaattttcatatgtaatttattaaatgataagtgacttgtcatttcatttacttgggaaatagcataataaagtttttaggaggttttcctctagctggtaatttttgacaattaaaaaacttgacccagttttgaaaaatatttgaaaatacttgaccctgcccaaaagccacctgcaaatagcttatttgcatgaacattaaacacaagggctttcatgttccttttacttattactgggataacaaacctccattcattaagcacagcatcgtttttgttgtgaatgaaaaatcagccaactttctgccacatctggctgctaatctataagttttgaataaacagtagacagtcaattgccggcatccattctcttaaaccacatgaagttttttttttctccccagtcaaaatgccatttaatacaatttcatttcatttttcagaacaaccaaggctttaaaaatagatcaggttttatggtgcagggcgcaaagcatgtattagataatctaaggataaatctgttcatatactaagtctctcagtgtccaattgccgataaaagttcaaatagtcactgcagacaggataatttcactgtatcaaaaactggcatttgcattgaaaagtcatttctactcatttttgagaaaccagtagcaaagttattaattttataaaaaacctagactcaatctcagtgaagatcttaatgggttttttgctgggcaaaaagatgagggcagtttaactgcgatagctacaaaacatggcatataaaacatttatttaattgaaaaataacagctacagcatccataaaattcaaagcccagcattagcattttttcccactggttctaaatgaaccccatcctccttactttaaaccttcagaacagttgcctatagatagagttattagtcagacatttgggaatatctttcagtgtagccatatgaaaatctaccagagcacacataagaaaagtcgttcggtaatggaacagacagctatgcctcattaaaatgcttcaccagataaactataacaagactatttgttctcataatttgttacttttattaatgaagcctcccaatatgatgcccctcccttttttattagcagcaatatcaaattttgtcctcagatttatgcatatttgggttcatttcttaactttcttaaacttcaagtttatttaggcccctgtttcaactaacattttgctgaatccttatacatatttatgctatgtattattcccagctttaaaattcccgtttttaaattgatattaactcctcttctaaaccattttttctatatgtaatttatatgtatatatatgacatggatacagaatttccttttgtctcaaatttttgtttattccctattaaatgatgagtatccctaaattatagaagaacagttaagtctttgcaggttttaataaaaagtagccagaccagttctgtaactaaaaccttcactgacctcaattacctgtactcttatgtaaagagaggactagacattctaagaattatcatatagaaagtgaattagttacctaagtgagagtgcttttaattattttctcttttgtaaggagaactaaacttgcttccaaacaggaagagagctcaaaaagactgggagcaatttcaagaaggaaagaatgggatatccctctccttctggcactcagcattgcacccatcctgcaatggaaccatacatgatgagacagttttgggaaagtttgataggtgtcctcaagagtttcaagatgaagctaaacatggccagttgttgcctgcttcttgctttcaaaattctgaaggctacatgctcattgaggcagcttttgatggcaagatggagaaagagaaaagatgccagattcttcttcccactttagatgagtgaatatgctaaatataggccaagtccgtgccacagaagatgtaagaggcttcagatacccactggcaagtgtttgcaagaagtcagcaggagaacaaattacacaggttaacaaataggtagcacagagttacaaagaatttacagattcactcccgacagaagcagcatttgggtgcctgcctctcaatagaaaaagatcagattattaaaaaaaaaaaaaagcttctctcttttcttttaattcttcctgctacaattcttgttttccccgttacaatccgaagggacccataaacagcacttcaaatgtgtcatgtcaccctctcctggctgtaaggtttccactgaaaagtctgctgccagatatactgaagctccattgtatgttatgtgtttgtttgttctcttggtgcttttgggatactctctttttccttgacctttgggagtttgattatcaaaagactcaatgcctattggctctgagatgattgcttgttttctgggactcaattataaggaagcaaagaagggaggtctgggcataccgacatgcttacctgccatgcagatgcaactaaggaaaagctcccagatttaccaagtaaaagtacaagttgcccattgaatttaaatttcatataaatcatgaataatgtttagtatatgtaattcctaaatatttcatgggatatactcatagtaaacaatgtaaattcagctgggcatggtgtgctttatttgacaactttgaactgagtcttcagccaatcctactgggcctctttcagagttgtcccaaattgatgcaaagcagttgcatgtttgtataactacattagccagccatgggtcaatggctgctctctgaaaggaggcaccactttgggcgagttagttcattttagtttgtcttaggacaatatttagtgaaaggtacaggtgtgaatggtcagctgctgatgttccccatgagtgtgggatcgatgtcttcccatgaagatggggtctggatgatgaaccacagtgtctagtacaataatttctcttatgtgagcttcaagagtgatattgagttaatgtttctatatcctacttttttgttttgttgttttgttatgactttgttctcttaacaattaattttccaccttagtgtttcttatactgaggaattgtagctacttttactacagaggaatgctgaggaattgtagctacacatgacgattgcaatttcaaggaaagggaatttatgctgaaatatttgaataacttcccctcttagtttttactatgtcaaaaaaattcatataaatgtatccctttacacaatggtctactgaaatttttggtgaaactaaaacacagtattgccttttttactgtaaaagagaaaaaattaaatagatttatgtacagagacacctattacaaaaaatatttttaaatgaccctacactgtatttgcataaaagacttaatttgtcatttccttagaaatgagaggttaggggccaggctcggtggctcatgcctgtaatcccagcactttgggaggctgaggcgggcggagttcgagactagcctgaccaacatggagaaaccccgtctctactaaaaatacaaaattagctggacgtggtggcacatacccgtaatcccagctactcgggaggctgaggcaggagaatcacttgaacccgggaggcagaggttgtgatgagccgagatcatgccattgcactccagcctaggcaacaagagtgcaactctgtctcaaaaaaaaaagaaaaaagaaaagaaaagaaaagaaaggataagtctgaagaaataaggagaaataagataacttgcttgagaaagaaacatacacaaacttgatagctatggagtatactagataatccataatacgaacactcaggtttgaggagattctatatagcagaaaaggcctatcttcacaaaactgctaatttgataggaagtctaaccttatctttatatggttgttaatgttaaagcatggaacttttaaaggaccttttattttgtcaaacatttacttaagcaaagcacactgctcagtgcctggcactttaaaatactcaacaaatattgcttttattgttccttttttttatactcatgggaaaactgctattttaaataatctgtaattgtttactatgtatttgcaagttaaagtatctaaatgtagatagattttggtaattgaagataaaataatagccctgaaacaggaaaagtgaatgtaaagttgatgtcttccagggctagagaggtatgatataagacagtaggggctgcgtaaaagtggagactgtgtattcaacataaagatattcaaattcactttgaaaaaataatcgaattttcaggtagccagacttgagttgagacaagcagtggatctgaaaggccatgagagaagtgtggaaatgttatagtgtaaaacaggggtcccaacccctgggccacaaactggtaccgggcctgttaggaactgggccacacagcagaatgggagaggtggatgagtgagcattactcctgagctcagcctcctatcagatcattggcagcatttgattctcacagaagcaccagctctactgtgaactgcgcatgcaagtgatctagtttgatccttatgagaatctagtgcttgatgatctgagtagtggagcagttttatcccaaaaccttccccccaaccctgtccatggaaatattgtcttccacgaaacgaatccctggtaccaaagaggttggggaccactggagtaaacaaaattaaggcagtattaaatacgaagatgtcttagatgttattttcttgcaagagacagaatcttatttaaatttccttagtaaaacagaggtttaactaaaaggatacaaaaatatcttgggctcagagtaaataagaaatcattagatagctgtttgttttatatctagttccaagtctgcatggtttctagttcccattcatctgtttatcatcttctccaatacagattaatttggaaggctgttagtatttgctccctttaacttaagtttatccatggctttggactgctgcgacaattctggcccaatgctattagacttctcagttgagatgcctataattaacatactaaaatacctcattttctaaatcaaaattttgagaaaaagcttcatgtattatatgcttctccttgagttacacatccattcctacttttctgaactgtaaccagaaagaacggtcatggggcacaaataggattgggtttaaactctctgctttatcacaatgccagactgatatttagagcctctacatgtggaaaagcttatgacactccttcattgtacagttcaaaacaaaattattttgaatctgtaaaaaaaatacatactgaatctaaacagccaattctagtttacaaagttctggataagaccattgtcttagtccattttctgttgcttatagcagtatacctaaaactgagtaatttacaaagaactgaatttattttctacagctaaggaggcttggaaatccaaggtcgatggggcatatcttttgagagccttcttgcttgtggggactctcagaagagtcccaaggtagcacagggtatcgtatggcaagagggctgagtatgctaacatgctagctcaggtctatcttccccttcttataaatctaatggtttccctcccaagataacctattaatccactgacttatcgatggattaatccactcatgagggaagaactttcatgatccaatcccctctttaaaaagctcgttctctatattgtcatattttggattaagtttcaacatgagttttggggggaacattcaaaccatagcaaccatgaaagctgaacctttccaattctgtgcatggatgtttatatctgatatcctaattgctgaagcacagtttcaacctgcctgttgaaaaagtccatttgcaacccagcacaagtcgatcacttgctcgagctaaatctcattttgtctctcaaacatttttcccaaattcatgtcatccctctgctaacaaagagaacaaaggtttgtagatgtttcctctcccaaagatagggtgaataactgctttaggcagagaagatcaaagtgtgaccttattgagcacttttattggcttcagactagggtttcaacaagttcagactcctgtggctgcctcaccatgtctaaagaaattatgaatgatccatctccttagtgtgattccccacccacccactccaatccagcccttctctctacctcttttcaaatatttctctaagacttttcttagaccaatatgacttccctctcacctaacaccctttctttagcaagttatatttatgtcagattcttaatccattcaaagggaatgatgataaagaataaaagaataatactaagtattaaactgtgccatcttgcccttctctctccctgagaatttttgctaatttagtagccaggggaaatgattgcaatatctcctagtgatctggtggcagggggagcatctggtttgggtgagtcagtccctgactttgtaatatgacctggtgaataactcaatatcaataaatttcaacctgctgcaggttgctgaagttttatagaaacttagaagagctataagccaccaccataaatttgagaagcaaccttaggctcagagaaaaaactggctgttatctagctgtgaaacaaaacacataataattatatagtgaaacaggacttcaaaagagaacttaggcaaatgagatttatgttcaacatttttgtggttaattattccatgttgctgcttaataaattttctaatttttaagaaatacaattcaaaaatgaaagttttgattatattgtagggtattagcacatgttcagaattttcagaattggagttctctgctgccctaactgacaatgacaaaatcaagggtagaaacttaagcttatgcttatttcataatgctggtcaaattcaattaaaattagtaatgtaatctttgagtggttactttatatttgtgttctcaagcagggacaattttacttttcaggggatagttgtcaatgtctagaagcctttgtgattgtcaaaacttggagaggaggaggtacactactggccagagacactgctaagcatcctatagccccctctgcattaaataattgtctgacccaaaatgtcatagtgccaatgttgagaagctgtgctctacattcttcttattcctttattaaatcattattatgtgtgaagtgactgttacataactagtagtaaacaatattttattgaccacttatcacgtgccatgctctattctaagaactacatacattcattctatttatcctcactatactacaaaatagggtaggctataattccattttacagatgaggaaattgaagcacagaagaggtaacatccacaatcacatagcctgcagaagatagatctggatttatagtcaggtaatttggttttagaagcccatccactgtggtaaaggaaatcaagtgctgcttattatttcccttgactttctcctatgctcttgcaactctaagaaaaggaccttggcaaatctcaatctacagaataattcataattctgggagctccacagaaaataaaagttatttatttatttatttatttatagctgttgcagtgttctgccacaggtatagtcaactttgtctgcaaagttaaaatttttaaaatgaaagaattaacaattcctcccctaattatatatatatataaataaatgtaggccttaacattaacacaaatcattgaagtttcatgggtcaaaaatttaggcagatatgtagttagtaggcatcttatactaattagttaacatactacttcttttatttttattataatataaactatattcattttataatatacataaataaaaatcaaatgctaaatataataaagtttattttatatagtccagctcgctaatgtacattaatgcttcaatgataatattaaagtttcttttattttattacatttagatgcaaactccagccagggttcacatattgatttcacgttctagtaaaaactacaaataaaaaactataaagtcagagattatttcttaatatattgcatatactttcatccaatgtaagtcatttcatgacatgtttagctttttttgtcatagtggtctcatgttttaatggaaaatagtatgcaacaattttgctctgttttagatgtgatattgaagtttaaaacttcactaataattgctgcaaatataacacaacaagagaaagcactataatctattgaggcaaaacataatattaagtaactgaaaatggcagaaaactatagggtatgataacaatgcaacatgaaaagcaaagagctttatttgtggtattccaggttgagggagacattcaaatgcctattaattcctatctctaccaatgatcacatttatatggttctgtactggcatgttccctgaagtctactcgtgccccattagtggtaaaagaattaaatatttaaaaatatttacgcatattatatttattagaaaaaaatactgacttccatttatgttgagaatgtcagcaaatccaatcaactcttctcagtatttccttttttctttatttgttgctataaccagagtccaagccaacatcatttcttgcttataaatgtgcaattatttcctactatctccctttgctttcatttctgctactttatgttctattctccccagagtaatcaaagggatctcttaagaacttgtcaaatcatgtcactcctctccttaaagcaactcatgccgcgcattcatttagaccatacccaaacaccctagtgtgacctgccccatgaatcatattcagacctcatcatttgtatctgtactcccaattcacttttcttgagtgaaataatcttttttgttgttgttcctcaatcatcgtgagctctttcttgcctaaggacatttatactagctctttctttttctggaaacatctttttcccaaatattgtggctaattctgctggaggttttcagcttaaatgacatctccttggcatttctcatgaagtaaaatacaagctccacaagacaaggctgcaggggaagttaggaagggactacttttttggttttgcattctttgaaataaagcattatgggcaacatattaacaaaataaaatataaaaggaataccataaatcttcattttacattttttcctacaattattttctatatacctaccatctgtcattttctatctatttgctaaaaatttctcagcatttccatgtaagcaacatgcatattaactgggttgaatcctctgtgtcagattctattttataatccagagtgtttcacttgcaccttttacttccttaaagtcctaagataaacagttgcaaagagtcagactctttgaagctctaaacatacttctgctctctccgtcctaatagccaaaggagggcttttctgcattttctctattcaagttccttttgcttttcctaagctttgtagtaaaaatctgcactcatgttctgccatctgcttttagtatatttttaattcacccaccaattgccattttactgattatccccagaaggataaagccatttttagtaaaattctgctttaaggggaattgatagttgtggagaaataactgcacattgttgaagagtatttattagaacacagttccattgtatttgaggagagaaatgcattactgactgcaatgtcttgagtcaagaatttagcaagtttttggaaaagactttcataaggtggaacaggaatccacattaagttcttgaacacataagattgagttgagcaaatcaatcagagtttgacaaagtaaagcgatgaatctagttaaggtaatgaaataaattaatcccacttgcctcatataagggtttgaaagcagaaataaatgcaaataaaggaattagaggtagagttacacgtagaattgctggctctataatggagaaaagtcaagaagaatttgagataaatttatttgttggacaaaatactacttacaaaagagttggagttggatttgagttgttaatatataggtgtgaatgtgtgtgtgtatatgtatgtatatatgtatatgtacatgtggattctagaggtctagaacttaaattgtttggacaaaggatatggatttttaccaagtgtttatttaattgcattctaacaaaataatattcttataagtgtatgagaaagaccttctcccctatatttacttggaagattaccaattgtattgacctttcctaatttaatagataaaataactacaataataaaatttttattgatgtacttacagattaaacagttttcatattttttatgtttttgtaaattgtctctcatagctattgccactcctcacctttttaaatgtttattaatttgtaaaaattctcttaaggacatccacctttgaagtaaatgttgcaaatatttcccaatgcatattattgtcttttagctttgtttataatgaatttttacatttttaactataagactcacaaatatttgttgcatcaaacttatttatgatttccacgttggtcatttttcaataggccttctcacccccaaattattattattttaataatggtctttaaaaatatcaaataatatatgtattagctattaagtacagttagacttttttactaatataataaaaatttgcaaaatgataaataataaagtaatggatgattgtacaatgttatgccaattttccataatgttgttctaatattgtaatttgctttctgtcatacagaatgtaattttacttacggtacaaattttaggtaagagtagattcgagtgaatgaaggctggatgaacagtgatactgtacctaaacacaggttctgtgcattttaagaatcattgcagacatttgaatactggcaaatctttgttatatttaaataaaattaatatatctataaatttagcttatattttttcttttatttttatttatacacatatgtatataatatgactacaaacagtcaaaataatataaccaattcccacatacacaccatttagtacaaaggataaacattatctgtaccattcaagtactctgtgcaccctgtcttaattgattttaccttcttccccctcaaaatattatcttgattttctctaacctgttgtcttaaacaggtcttgaaaaaactgtggctgggcacactggtacacctgcaattccagctactcagaaagctaagccagattgcttcaggccagtagtttgaagacaaaaagtgctgtgaaaaatgttggctaggcaaagggatttgggaatactagggaaaatgttagactgctaaatgggtggttctgacaggcttcattcatttttaacttttaagttcaggggtacaagtgcaggttcattacataggtaaacttgtatcatggtggtttgttgtacagattatttcatcaccccagtattaagcctagtaaccactagttattcttttgtatcttctccctcctccaattctccaccctccaaaaggccccagtgtgtgttgtcccccactctatgtgtccgtgtgttctcatcatttagctcccacctatgagtgagaacatgcagtgtttgatcttctgttcctgtgttagtttgctaaggataatggtctctaactacatccacatcccttcaaagaacaagatcttgttctttttttatgtctgcatagtattccatggtgtttatataccacattttctttatccagcagaccactgatgggcatttaggttgattccatgtctttgcttagagaaggaaataaaagggtgttccagagggaatacccagtgccaagctctggttcaggagtgtggctgggatcctctaaaactgcaagcagttataactgagagttcttgcttaaagtgtggtttatgttcaaccatctggttataactgagagttcttgcttaaagtgtggtttatgttcacccatctggttataactgagagttcttgcttaaagtgtggtttatgttcacccatgtggttataactgagagttcttgcttaaagtgtggtttatgttcacccatctggttataactgagagttcttgcttaaagtgtggtttatgttcacccatctggttataactgagagttcttgcttaaagtgtggtttatgttcacccatgtggttataactgagagttcttgcttaaagtgtggtttatgttcacccatctgggactatacttttgaagtctatacttttggaaggatagatgtttgattttttttttttttcttttaaaactagtaagtcatttttgttcagttttttaagtgtctattttatatattcaaaagtaagttgataatgctttcttgtgctcattatggcttaaatttctactatgtttataagtgctgaccctcttttcatcatcatcttgtgtcttttgatctatctccttctttttctctttacttggtaaacaatctggctggaaatttgtctatttaagtatggtttttaaagaatcaactttattttttattgtactgcttccttctttctctttgatatatttttacttcattataatttacacttattttgtgtgtttatgtttatatttcttatataattccagcttttgctgtattcaacagtcttcctttttatgtgcaatttttcactgtcattaagttctaaataaagtataacttctatttttatttttctttgagtcataaattacatgcaagcttctgtttaagtttgcaaacaacagcattatctggctgcctctttttattgggttctttcttacatttgggtcagaaaacatagtcagtctaaaacagttttcttgacctctaaacattttgctaaattcacttattcaaaattttctgctaatcagaatattatgtaacataatcagaacataccacattacactctgataatcaattcactagaaagatattgtcccttatgtattaaaatttgttcattttttggaattctcagaaatgtttttcaagaacactttccgttaacattttacaaaatttaaaaatgcaagtaaatttatgcctaatcgtacattaagtatgattttataagtggcatataaacagattgataattcctttcctagagtgtagagatgccctatgcactgcaagacagtcaagggaaggagttggtttggtttaggatgcgtgataaagcatctcatgaagtatctgtatgctcagttttagaaaatggatcccatttctaaaaactggattcattgactacattattaaattgtttcaatgctgtattccactatatgttgcattctatagaatgtttacttaacatctttggaataatcattaagtaaacaaaaactgtcccctcttcctcaaaactttcttttattcccatgcttatccactgtcatcaaattaccacatctgacagaaataattttaatttcaccatcaattgctaggatattaatttagactacaaatagctgcatataaacataaatgaaaaaatatttttccactctcgttgttgaaacagtgggagtcctgaatgatttgatagctgtacaattaatcaaataatagactactggattaaatctcagtgaactaaaaatatctgtgcatagctgtaaacaaaattaaattaatatcctcagtacctcttatgcctttaatgctatcaggatcagtagatgtgattttaaatgacgattcatataaataggaatatacgtaaaatttaaaaatactaagtgaatttatacctaattgtactacattattaagtataattttctgagtgttactcctaaccagtagcaaatatgttatatatatgagatatatgatatgtgtatatatgatatatgatatatatgttatgatatatatatgatatgtgatatatatgttactgggtaggaggtacagtagcaagttttctttcttaaaagaatggtatactctgggtctaagaatgacaaacagatgatgtggtggtcacttaccagagtattttatttatactgatctgtacccctagaatattcaaaaatgaggatgtatgagatatataatactttttattctatttttctgagttttccctcccagttaggttttcggaatacaaacatggagcagttacatgacataagggcaaatagtataagaattattacactttattcatttgtatcttgtatacttcctctattgggtaaatggatagatgcaatgaactgctaaataatacctgttgaatccaacctgagtgaaaacaaaatcttatgcctattgaaaagcatacaatgtttgtagtagggagaaaggaatatgatagatgtctgatatttaaatgtaaaaacgttggccgggcactgtggctcacgcctgtaatcccagcactattggagtccgaggcacaggcagatcatctgaggtcaggagttcaaaaccagcctggccaatttggtgaaaccccgtctctaataaaatacaaaaattagccaggcgtggtggtgcctgcctgtagtcccagctacttgggaggctggagcaggagaatcacttgaacccgggaagtggaggttgtagtgagctgagaccgtgccactgtgcttcaacctaggtgacagagcaagactccgtctcaaaaaaaaaaaaaagtaagaacattatatgctaacgtgaatgaaatataaacaattttcaattttatattatatacaatggcagatcatagctgcacctgtaagagaagatcaaattaaaatcggttatctgtttgtttattctcttatcagtgcctggctttctagaaaaatttagctattttcatggaattctctgataaacattatgaactcatttctttctataatatgttggtaatattggccgtatataataatttagaatctcttattctcctttatttttctcagagcagtcattgccatttgacatgttatattttatttttgttagtttcctattttaccatacagctaattaaaatgaacttttcattaattcaattactgttcttttcactgttatagcccaagtatctaaaacagtgtctagcactaagtagtcaccaggtaagtctttgctgagtgaataaatcttagaaggaaaggagagagaaaatctagatcctttatagtatccatggttttctacaaacaggtagaatgtaatattttattattttgcaccatgtaagttagaatcattgtggaacatcacatttatacaattcttattagactatatctagatctcttttaaaataagcaagcaagcaagcaaacaaacagcaatgaagatacgctgaagaagttttgggaggaggacctacatctttacagtttcacccacaacttacccataccctccttcaatgaattcctagggcttcttagaaaatagtggatgcaattcaggaagtgtttgttttaaaacaccaagaatgatgactgtccaaattcagaatgtgttcatgtattccatagacaatgactgaatatctactaggttctgaaaaatgtactagttgctgtggtggataaaataataataatacactgtaagacagtcaggggaagaggttggtttggtttaggatgcatgataagatatctcatgaagtatctatatactcaattttagaaaatggatcccactcttaaaaactggattcattgatggcattatcaaattgtttcaatgttaaatttcactatctatagtgttggaatattagtccagtaacaatatgaaaccaaagatacatcactatccagtaaggcagtttatattattaccacatagtacaatgtgttaacagagatcaaagataaatgaacacttccaacataaaacgtataataatttacttcaggtaacatatttttaaattatgggtataattatgggcataatcataattactacttagaaatgtattatgtgtatcatttaacattttatatataacattttgaatttttaaaatatttatgggtccttgttgttaaaatgaagtggcgttccagaaatagttgattgtagatttgttgcacgtaaaacagagaaatccagcatttataggtaacaccacagttaagaggaaagaaaactaagaaaattgcagtagaatacttttgtgaggaaaaaatgaaatgtcaaagataaaatttttatggttctttaatcacaatcatcaaattgtaacaaatggaactttaaaattgaatttgtctcttgtctgaattacacctgagattatacctgcacaccaagtgaagaatcatatttcaaaatgcatttcatttggcttttaacacagttattctgttgaagacatttctgtaaagcttgccagatacaggaaaagcaatttaataaacactgtgatcaaataactactcaattgttcttcatcttttttaacatttaacaccttgcagatcattgctacaataaagtgtgttatccccttttcacaatgattcattaacctgtattaattgttctttacaaagttgtttttatacatcttactaactaccaatgtgaggaaaaggtctatgttgctttcattcagtagaaaacacatgcactttaataatattgtttcttaaaaaacacctattggtttgttttctttcagtttctcatttatcatcatttgttcatcttcactgaaagctgaacatatgcagcctaacaacaacttgaattaattgaatgtttcgtatctattctccaaattaaattttcagttttgctcaccttttcatgattatattaagaaaatgtagccataattgcttgtatgggaaaaattactgagaaagacattcagattaaatgtaggaaatgctctaaggatctttgaaaggaaagaaatgtcaggttctatattgtattcaaggaagataggagatgaaagtgtcagatatgcaaggcagataagaaaatagtttttaaaaataagtcatagacattctttttctgatagttattgaaaaatcctgttcatcaaaagatatcttaaatcaataaagatttcctcaacaaccagacaaaatcgttctgtgtgtgtgtatgtcttattggaactgtaattatatttacaatactataattagtcgtgttattaactcttgttactcactagaacattattggtaataagcagtgacatatcttaaagatttttcttgtgtcccagcgtctgcccagtgattaatatgttcagctccataaatgtttattcaacgagtaaattagtgactaggtactaagttcttattcttgtgtacagtcacctatcaaatctttccactcttctctgggcaattggggaagctatgtatagaaaatggaagagtctctgtcagcctgggttactaagggtgaacctgaactttctctgagtgaaaaaaaaatctattttactgagccacagagatttggatattcatattttatagcagtattaactaatacaaggtatttttaacctttaaaagaaaagaagaaaaagtagaagtgatactaatttcccagatgccatccaactcctctttcaccaatagatagcattgaaaggcgggaatcagtgcctcctcctagtgatagtgcctcagttgagcagggcttattccgaattcagtatgcaacatcccgacagggcaaatctagggattgctctcaagtcactatccaacatcccgatgggttgaatggcatgccaaacacagcaataagcactataaaaaagccaggccgccccggggtggggccacgtggcttcagaccagagagcggagctaccttggcccaagcgctgcagctgcctgaaccccggggcttcgcagccttgcttgttttctctgaaccgcaataggatggtgttcacagcgattcaaagggtggcattgggttggacgttttggttacgagccagcctattcccacattgtacgtgaatgtttaatgtgctctcaaaacatggaaaataagtttagtgcacatagctaaatcacaaaacatccgatttctgtttcctcaggaagtcattactgcgccaccacatcacgtgaccttaacatgatcaatgtatttctctgccttgacatttaaataaactatataaattaagataagtagattagaaaatcattcaaattataccataatctgtacaaatattgtgtcccctgccaggcaagggacagggtgccggcgacggccgcgtggccaaggccccgcaggaaagctcccaggtctccctcactctccaggtgccctttgcacccaacagtgcgtgtgaggaacgaactgctgtttgaacgtcccctgagattgtgcgtagccccgtgtaaatgtaatagcctccatggcttaattggctatcaagcgaattttcccagatgaaagcaatgttgggttaggggacgacggtgcagccacccagcctttaccagcagcgtgctgcagacgaaggcagtcaaggtgtggaggtgatcacgcaggtacatgtttttgactgtttaatttgaaagttcacattttttatgctttgcgttgatgtgtaatttttgtactcttggtgactagtttttgtcaaatcttttttggaatattgcttaaatgttttgattttatgatagtgaagcttgtattcagtgttttgtcaattaatattttatgctagtaaaaaaagcaaaagagaaaaaaaaaagatcttagtctgtttctaaggcccagaccacacaaagtatccattttcctctcttgtctataaaacaaaactcaccttatcaacagtttctgttctacccaaagatgttaaataaagtccaaggtagtgggatgggggaagtgatgttttattgtctatggcacgtgtgttcctaggacctataaaaaggaaagcaggtaaatgactttgatctgtttgataaatgatttttatcttgagtagtgtagtcacttaaatatgttgatcctccttctgggtggaaattatttcaataccatgttgtttttgttattattaactatatattattatgtatataataatacataaaagttataggaatgaaataaaaaattattgaaatcctaacacacagttgtagctatttttcattcatgtatttattaaatattattaaattattcaccacataataaatagtaaagcattttccacataatcatatctaccgttttattcatggaaatcattttatttgattatttaatatttattttagattaagcatgcatgtgtacatttgttacatgaatatattgcatgatgctgaggtttgggcttctattgaacatattatctgaatagtaaacatagtacccaataagtagcttttcaaaccttgccttccttccttcccctgttttggagtccccagtgtctgttatttccatccttttgctcctgtgtacccaaagtttagctctcacctataagtgaggacatgcggtatttggttttctgtttacatcttaattcatttaggatgatggcatccaggcacatctatgttactgcaaaggaaaggatttcattctttcttctggctacatagtattccatggtgtatatgcatcatagtttctttatccaatccaccattgttggaaaccaatgttgattccatgtctttgctatttcatatttgcaatataacatgcaagtgtgcagaagctctttagtttaatttggtctcacttgtcaacttttgtttttgttgcttttgtgttttagtacttagtcataaattctttgcataggccaatatccaaaagagcttcttaggtctaattctaggcttcttatagtctaaagttttacatttaagtctttaatcaatcttgagttaatttttttatatggtgagagacaggagtctaatttcattcttctgaatatggttagccagttttcccagcaccattaattgaatagggtatccttgccccattgtatttttatcaattttgttaaagatcagttggttgtaggtatgggacttcatttctggattctctattttgttccattggtctatgtgtctgtttttgtacccaaaccatgctattttggttattgtagccttgtagtatagtttgaagtcaggtaatgtgttgcccctgcctttgttcttttagcttaagattgctttggctattcaggctcttttttagttaaatacaaattttagaattgattttctaattctgtgtaaaaataactttggcagtttgataggaactgcattgaatttgtagattgctttgggcagtaaagacattttaatgatgttgattcttccaatccataagcatgtaatatttttccatttgtttgtgtcatctatgatttcattcagcagtgttttgtagttctacttaaagagatcttttacctccttggatagaggtattcctaagtatttcttttttttttttttctgtggctcttgtaaatgggattgtgttcttgatttggttctcagtttgaatattgcattgtatagaaatactactgctttttgtatattgatttcttatcttaaaactttactgaaatttttaatcaactctaggagtctttggtcagaatcattagggttttctaggtatagaatcctatcatcagtgaagaaataaaatttaatttcctcttttcctatttggatgccttttgtttcttgcttttgtctgatcattctggctagggcttccagtattaagttgaataagagtggtgaaagtggatattcttgtcttgttcttattcttatgggaattcttccaacttttgcctgtttagtataacgtagactaggtttgtcaatagatggttcttattattttaggtatgttctttgaatgcctagtctattgagggttttaattatgaaggcatgttggactttatcaaatgttttacctgcatctgttgagataatcttatgttttttttcattttaaattctgtttatgtggtgaatcacattaactgatttgcatatatttgaacaactcttacatcccaggtataaagttcacttgatattgtattatctttttgatgtgctgctgaatgtggtttgcaagtactttgttgaggattttttcatctatgttcatcagatatattggcctagggttttgttttttgtgtgagtatttgccatattttggtatcaggatgatataggttttgtagagtaagttagaggagaatctctcatcctcgattttttggaatagtttcagtaggattggcatgagctcccctttgtatgtctggtagaattcagctatgaattcatctagtcctaggcttctattacttattcaattcattctgtaattcattgttggtctgttcagtgtttcaggttcttcctggttcaatcttgggaagttgtgtgtttccaggaacgtattcatttcttctaggttatctagttgtgcacatagaaatgttcatagtagtctctgagaatcttttgaatctccgtgggactcgattgaatgtcgcctttgttattgctgattgtgcttatttggatcttttcttttttgttaatcttgcttgcagtctatcaattttggttacactttcaaagaaccaacttttcattttgttgatcctttgtgtggatttttgagtctcgattttattcagtcctgttcttatttttgttatttcttttcttatgctatatttggatgtagttttttttcttgttttactacttgctctgggtgcaatgttagattgttaatttgagatatttctatctttttgatgtaggtatttagcactataatctttcctttttaaactgctattattgcatcccagaggtttttgttcattgtgtctctattttcatttgtttaaaaaattctttgatttctgctttaattttattgtttacccaaacaaaagtcattcaagagtaatttctttagtttccgtgtgtgtttgtgtgtgagtgtctgtgttttagagttcctcttgctattgatttttatttttattctactgcggtccaagaagatgcttgatattatttgattgtttttatttcttgacacttgctttataactgcatatgtgatcactcttagagtatgttccatgtgaagatgagaaaaaaatatatatattgtggttgttgggtagagtgttctgtagatgtctattaggttcaattggtcaagtggcaaatttaagtccagaatttatttgtttagatttctgcctcaataatctatctaccactgtcagtggagtgttgaagttcccagttattactgaggggctgtctacctcttaggtctagtagtgatttctttatgtatcgtgatgctccaattaatattgggtgcatatttatttaagatagttaattattcttattgaattgagccctttgtcattaagcaataacatttttttgtccttgtttctgtttttggctgaagatctgttttctctgatatgagaatagaaactcctgctcttttatgttttccatttgcatgattaatctttctctatccctttactttgaacccatgagtgtcattagttgtgagatgggtctcttgaagacagcagatgggtgattctgatttttttattccaattcgccactgtatgtcttttaagcggaggatttaggccatttatgttcaaggttaacattgatatgtgagattgtgttcctgtcatagttttgttagctagtttctttgcagtctcaattgcgtagttgctttatagagtctgtggactatgtacttaactgtgctttttctgtgtattgttctttcatgtccacatttagaactcccttaagcatttctgcagggctagtctagtggtgataaattcccttaccgattgcttgactcagaaagactcaatctctccttcgtttatgaagcttagttttgaagaatatgaatgtttatgctggaatgtcattccttttagagtactaaaaatagacctctaatctctgctggattgtaaggtttcttctgagaagtccactgttagtctgatgggttccctttgtaggtagtgttgctcttttctctagctgtgtctgagatttgttttttcttttgtgttaaccttggatagtctaacgactatgtgtcttggggatggctgtctttatagtgtataacagaggttctctggatttctggtgtatgcatgtcaacatctctagcaaaattgagaatattttcttgaattttttcctcagatatgttttccaagttggttactctttcttttctctcaggaataccaataagttgtagaagtggtttctttacataatcccatatttcttgaaggctttgtctttttaaaaaatattttttctttatttttgcatgactgggttaatttgaagaatcagtcttcaagctttgaagtgtttccttctgcttggcctagtctgtttttaagtctcccaactatattttgaaatttatttagtgaatttttcagttccagaagttcagtttggctctttcttaatataactatgttgtctttcaaatcttggactgtttttctggtttctttgcattggatttctattttgtcttatgtctcattgactttccttgacatccatcttctgagttctatgtgtctcatttcagacatttacatctggtcaggatcctttcctagggagctagtgagaggctttggagatcacaaaacactctggctttgtgtattgccagacttcttgtgcttattcctttccatctgcgggagttgacacttcttttttgaatttgcttcatttagatggggtttgtattagtcagagttctctataggtaccgaagtaataggatagatgtacatttgaaggggagtttattaaggatcattgactcacacgatcacaaggtaaagtcccacaataaaccatctgcaagctgaggagcagggaagccagtccgagtcccaaaacctcaaaagtagggaagctgacagtgcagccttcagtctgtggctgaaggcctgagagcccctggcaaaccactggtgtaagtccaagagtccaaaagctgaagaactggaagcatccagcacaggataaagatgaaagccaggagactcagcaagtctgctcttctgccttctcctgcctgctttgtcctagccgtgctggcagctgattagatggtgcccacccagattgagggtggttctgcctctcctagtccagactcaaatgttaatctcctttggcaacaccctccaaacacacccgggaacaatattttgcaccctttaatacaatcaagttgacactcagtattaaccatcacagggcttttatattttttattctctttgaaagtatgacagtggtgtatgtgattgattggcttcatttctctgtagttgcagagggtgaagtttccatatatgttccttggttacagataggttgctgcagtggctttcacagatgttgcttgttttagcaatgtatttttatatgatggtataactcaaacttcagtctggtagatggacttaagagtaagagctggcaggtggggtcttggtgcatgcttgccctcactggagaatcatgagaaacaacttctttcagtgcacgctttctgggcccctatgggaagagctattgttgcatctgcaacagtgcactggggaggggagatggaggcgagacataattccttctccaagtctggttctgggccttggtggtgctcctttcagtggcttatgccatggccacattttctttgtctcatgtggtgctttggcaggctgcactcccccttcccttagggatggtccacactgaggattacatctctagggacacacaactctccagagacccaccagtccactgtgcttaccaaagtcagagcaggttttagggtatgtctgcagttgctctgatgatgcagtatttcaagggtagaggatctccaggcagggcagtggcacaatgggtgcaacaccagtatggagtctgcagcccatgattttcagcccagcaggcaaccatggagtctgcctagcttacactcccctgacccagcagatctcccacagacactcgccctggcggcaagcccaaccaactaggctttccccaagccatctgctcccacattgttgagctgctccaggcattctgtgccaggacactccctgggaaagaagctaccaccatcaggccatacccttcatggtctggtcttgcaaagggaggggtgtccagctcccatgcccccatgagaacccataccacacccttctctgcattctgactatggaggatcctccttcacttgagattaggttacaaatctcagctcagtgtccctgggtggtatacttgagtcttggggagttgggactgggctcacggatttgtcctctggcctctaagcttcaagcactggctgtgacttggggacagggtggtgagcttttcccaggctgtcaacaaaacactcaagctatgcagtggatgctgtgctgtggacaccctcttgcaggcgtgaccaggcatgagctctgggaaggggttgacaggcaagggggcatgtggaccagatgcaacttaatcacacagcactggtgatggggcctatcttgggcatgtgagcaggccaggcgcggttcactcccagcctggcggacagcaggaacttagccactcagtatgaaatggaggcttgtgggatgggcacctagggttgcattttgctgcagctgcacagcacaacaaagccttctgggctctgtgtgggttcaaactgtgcctctgcatgtgctcgaggcagctctcctaccagtccaaagatctatgagggtcgtagaaactcctgtaactaggatctcagaggtacattatgggtatgtagtgtcccagggttccttcactcaccccttccttgggtttgttcagggtatatgggccagtcctgatgtctagtgactctgagcagactgtcccatttcttccctcttcaaccatggtgtctgtgtcacctctgtgtcaactttcagtgttttctctcaaaagatctgtttaaaatgtgaaggtttactagatatttgggttcctctccatggaagaggcacttcccaactgcatctccttggccatctgccattctccaaatcttttttggtgcctatttttcctttttactttctgtgcttcctccttattctcttcctccaacactgatatgtactctgacattcaattctaaatatatatattataaaaaatagatataatgtgcatatatgtgttcattaaggatagaatacttggctgggcacggtagcttatgcctgtaatcccagcactttgggaggccgaggtgggcggatcatgaggtcaggagatcgagatcatcctggctaacacagtgaaaccccgtctctagtaaacaaaatacaaaaaattagccgggcctggtggcgggtgcctgtagtcccagctacttgggaggctgaggcaggagaatgtcgtgaacccgggaggtggagcttgcagtgagctgagatcatgccactgcactccagcctgggcgacagagcaagactccatctcaaaaaaaaaaaaaaaaaaaaaaaaaaattcagaaagaaggttactacatctgaatttctgaagatggttttagtagggatgaattcaatgtaatccatggattattcatgactttgtagaaaggttaatgaatgtttcttttagccactcgggttgggacctctgaatcaataggaagcataaatgagagatgtcaggggaggattgaaggatgctgatggaggtgggaaggcctgaagtgacccgcctgtgctagactgaaagtgattcaggccccacccaaatgcatgagcagtggagcctaaatccttcacaactgcacattagaggagagaggatttgaccatcatcctgcaattagagttactgttaatcaaggtaggaggacaagatgcgttcccacttctgactctgattgccctaaatagaggccctgagtggtaataatttgttttgaaactaggagacagttcagtcagtgtttcatcagattcatgttttgctgaaaatactggcacattcctccatttaatgaggagtcaccacaggtaactcaagggccttagtcctgctgcccacataagggagttctggtcctcaggaaatggggccgtatttgaaggtaacgaaagggataagatgagacatgatggtgtgatgagtattccagtgactgcttttggtaaatttgggctggcatgtgggtttcagttcctctgtctagaaaggaaatgctcctcatgactgacaaaagcaggaataggttttatcatcagctctacaccaaggctctccagttactagagtggtctctagaagacagcattatcagcaaattccattagcaactaacttgcttctgtggtgctgtgttgttgttaatagttttaattatagcagctgcaatgcagggaacctgatccaaaaaaggcacaaaccaaaacctgtgctcctaaggagattataagaaatgaaatcaccaacactggcctctctttgggaggaaactggaaatggcaagagggaccactcatgggctaaagcccagcacttgggtcacaactcaccctggagaggccaagtatgggccccattgcttcaggccttggctgtggatcacaccctggattcttctcttccaggtgcagctcagttgccgtgatgctccttgagtcaatgagctctttggtctgctcttctgctcaagcagaaaaggattggcacttcacccttgagaagctgacaagaaccacaggcttcttcaggcaggtggtggaacatgggtgtatcctgcaggtgctcacagtatctccctttgctcaggtgacggaggcttggggttttccagctcttgacctaaaattcctgaatgattgttttcaaatttcttaatgaataataggatgaacttgccacccctgtcaggggggaatggggttcctgaaagctgagaggccaggatccagatcctgagcctcttcaccaagcagatgctgtagagcaaaggcagcaactatctatctatctatctatctatctatctatctatctatctatcatctatctatctttccccttccctttaaggaaatcctcaggactaggtgagatcttagatctagtggagaatctgagctgctccaagcaaaacctcaggatcctgcaatctgaaaaggtagaaccaaggcaaatgtgggcagcaatacccagaagttgggtactgagcctgttagggagcatttttttcaggggagtgaagtaaacaatgaggtgtagagagcagcgagaatgagaagccaaatcacagactacaaaatcacacagcatctgtcctttctccctgggcagagagagtatgatgggtagtctccaatatagaaagcccattgtgtccttcagctcccccatacagtcgcagaacaagcctgattctgaaatttctattctctttaggctctagcctgattttctggctcataaggccaaagggagctggaaaagtccccacggcaggactcatggtggagagagaatgatctagaggattcaggcctctgcatactgtgtctgggtccctccttaaagaatgataaagacaagtaaagagcttgaagcagcctggagtccagccagaaacctttaactgagctttaaaggagatggtcacaacacttttcagaatactggcaaaggcctcctgtggccaggtttgtcctgggatgagcaaaatttaatgttaacctgctgtatctttgcttttaatatatctgcttgcccatcacaatgatgttatggttaatttcaccaatttggtaacctgcctcttgggaagtacgaaagtaagcaagggccaggtgtggtgactcacgcctgtaatcccagtactttgggtggctgaggcgggtggattgcttgagcccaggagttcaagaccaacctgggcaccatgacaaaaccccgtctctacaaaatatacaaaaattaaccaggagtggcagtgcatggctgtaatcccagctactcggaggctgaggtgggagaatctcttgagcctgggaggcagaggttgcagtgagctgagatcacaccactgcattccagcctgggcaatgaagtgagaccctgtctcaaaaaaaaaaaaaaaaaaaaagagagagaaagacagtgagggtgtcctgtgaatcaaatctttgaatggatgttttcttaactaaccaagacctctgtaagaattctgtctttgattccacaataaagtggtgtgaaattactataagcaaatgtttacatgtctcatttaatcttcacaacaatcctatgaggcaagtagaattgttatcctcattttctgagcgatgaaactgaggctcaggggagggtgtgaccttgccaagtccccacaactggaaaccacggaacaaaatgacctgagtcacacatgctagaaaaaactcattgtgcctccccatggagattcacaatggctatttctgttgcaatagaggatgaagcaggtggtctttccaatcaacagctgttaagaaaggctccagttctccccggggaatctcagaatcagactgaagattcagaagagcctttgctgaccactgagtcaaactccccagaatccttttgtagtaccgctgaccagtgagtgatcatcaaacctccaaagacttcggtaatttgcagattctagggaaaattccatgagttaacagaggtgaaatttgaaagttccatagagaaattctggaacttgaaattatcataggaagattattatgcaatttcgttcctgttagtagtctttaataaagagacttcaggtgaacattgggttgaaccaagattactttctcccattgtcaccattctgatttcagattgttccttgctggtttatatcctcttcaattccattttgtaccagatagaggcagagtagaaggaaaaactgaacaacaaaccgcatttgtgccagctcgagggataaacaccctctaaggagcatctcaagctttccacaagatttcaacagggtcaccccagttcacagccaggtagtgtgtcttcaatgtgtggccaatcgctgttggacaaacaggaggtgttttccccaggataccctgcactagactcggcatcttttcagtcttcttcttattctgtctccttcccagcacactgacactggaagcacactaagtcatcacatgagcaattcacaggtgccatgaaatacctcacaaatgtacagtactttaactgttgaccccatgtattaggtaagaaagatattattatttacatttatctattggaacttgggggcacagagtgtttaaattacctgcccaagggcacacaagtcactcgcctcttgtgtttcaattatacaatggcttagtgattctttctttcagacgattgttgtgaggagtgaatggaattaaatcaagtctatgtggaaagggcctggagtatgagttctcaatgcagggtgactactgtcagcaccaactagttatgataatgaccatgatgatgatggggaaataataacaccttgaagtaataataatgaagttagaacgatacccccaaatgtatgaaaattacatctataaaatgagttagtttataaatcgtgagaaaatgggcatcctcaggtattgcaggtagaaacacacaatggaataactcttgtcagcaagctaatccatttccaggaatttttattttttttttttttgagacagagtcttcctctgtcacccaggttggagtgcaatggcatgatcttggttcactgcaacctctgcctcccaggttcaagtgattcccctgcctcagccccccattagctgggactacaggcacacaccaccgtgcccagctaatttttgtatttttagtagagacgggatttcaccatgttgaccaggatggtcttgatctcttgacctcatgttctgccagcctcggcctcccaaagtgctggaattacaggcatgatcaaccaccccaagtccagaatttcctaacaaggtctcaagagatgaaggtgctactgttcagtgaccccctgctcaaaaacactgccctaggagatgggggctcttctatgccccatttttacaggtaaggctagtcatggaagtgggagatagaaaataaagggtggggtcaggttcctttctaaaaacctaaatgcatgtcaggcaagtagggcttagaaaagaatttaccctccttcacctctgtcacctcatccctccttccaacctccatcacttgtgtggcaaactggactcggagccagaaggcaccagaaaaagtggaatgtgagcctgcaggccatcaaggtgaagccctgaggatcccccggggccagtccctccactttgatgcggataagcctcagctagtgtcaagttgaaaggagaaaaagacaggtgagtcactgttaaagaaacaggttcacatatgtaggtctaggagcactgcaagtagttcttacagtgagagagagcaattgtgctcaactctgaatccagcacaaggaagtggtaattatactcaaggaggaggatgggggttagcagataggaaatgactatgagggaacatgaagggtaagggaggattctggctaaactgacctaacgagattctcgctgagcacaggccaaggttatctgacatcagctgcgggatggtgggggatgaggaccctgatcagtatatggtggacggggattcctgccagctaaactgacttagcagggtaatttcctaaaactgaattttacaaaaagtgcacagatgggtttagcagaaggttcagaagcctgaccaatgtacggtcaagcaaacaatttctgtcaccacacagaatgcatgctccagggaccatactgggcctcagcatcttcctaccccaccagcttccaggagggcattttgccctgggcctcctgggtgtttccttgcctgatcatttctaggagacaagagacttgcactttatcatctaggataaattcagtgtcagatttttaagcctaaatcggatgacagtgcttcagtgacaatctcagttatttaaaaagggaggttcattcattcaccagttctaaaggtgcacataagacattcttttttttttttttacaaaaaaattgagaccaagttaaaagaaaaagaatgaaaaaaatcaagcaacccgaatcccttatataatctcttcaaaaccccaaaccagggaaatcttctcaatataaacttgggaattttgttgatcactgactgcagtctggtggtttatacttattttcttgtgtcccgtttcctcccttctcccacccccagcccctcagcaggtgctgccttcctgtcttggtctcattgtcctcaaatcagacctgcaggtatggtcccaagtgcttctaaccttcatcctcatatccacgggatcccctgagaacccagcttctgttattgagaactgtcccacctgctgactaaggagtctgatctttattcagaatcattgctaagataccagaagaaataacatgtaagagtctagtatagaactcacagttctgatctgaggaactaacaattgcttatttgaatcactgtatttcctatttatattcttttttttttttttttttttttttttttgagatggagtctcgctatgtctctcaggctggagtgcagtggtgcgatctcggttcactgcaacctctgcctcccaggtttgagccgttgtccctgcctcaggctcctgagtagctgggattacaggcgcccaccaccatgcctggctaatttttgtaatttattttattttttttgagacagagtctcactctgttgcccaggctggagtgcagtggtgccatctcactcactgcaacttctgcctccctgggttcaagcaattctcctacctcagcctcctgagtatctaggattacaggcgcctgccaccatgcgtggctaatttttgtatttttagtagagacggggtttcgccatgttggccaggctggtctcaaactcctgacctcaggtgatccacccgccttggcctcccaaagtgctgggattacaggtgtgagccaccactcccggcctatattcatatttctattcacaatatctcctacacagtgttttcctgttctatggggagaaatcaggcagatagcagaagacacaggtcagatctcaggaagagtttctatggcctccaaacaagcatttattgattatagatgtaggggtgaatattacgaatatggggagatgtcccacaaggttagctcctatgctacctaatgcaccaggcagcttgtccataacttagtttaaatatatctgtcaggctccatgcccatttgctgtaaaagcaagattactgaggtaatcttagattttaaaatggaaaactgggcctcacaaaagcagttgggaaaattacctggagattgtttctaaggcagtgcccaactgtaccaagcaaaggacaacaagtacaaagtcagagcttcattaacttgatgattgattcattcacttacttaatgcaagacttcaggggaagaagagtcgctgagtggaggagacgggaaacaatgcattatgaaacgcccatggtctctggatacccacccagccagtccccaccctcctagggtctggtctcgaccatctcatcatgtgttttgagggtgcgttttcctaccagttgtttttttgtctttgagacagggtctcctctcgcccaggctggagtgcagtggtgcgatctcggctcactatagcttcaaccttccgggctgggcgatgctggtgcctcagcctcccgactagctgggaccacaggcgcgggccaccacactcggctaatttttgtatttttagtagagaaggggtttcgccagggtgcccaccctgttctcgaactactgggctcaagggatctgcctgcctcagcctcccaaagtgctgggattacaggcatgagccaccagcaacacgcccagattcttctacacccttaattgggaggtaaggcttctgcttgcaggctgtgcgttcttccagccagccgcacctttgctgtggactaaacaggaaccactggattacagtcctctggctctctgccctgcaggagattttaatcaaaaattctaggcctaagggaaaagcagggttaagctgaaaatgcacacagggctcctgtaaatttcttttcataaaccacccgcccagggcattaaatagggtacttagttgatccgaaccctccagggagacctccgacccttctcttcgtagcccccagctcccctcccccggttccactgaggcaaggggactgagctgctccacatgccaggagtcagcacgccggaaggccccgcccagcggctggcgcagccaatcgcagagcgggcaagtggtgggggcgggcctgcctgggcggcaagggggcaggggggtctaggggctttagaggtcaattagctgctttcgggcggccttaggcgacaggagactcctggacccagcacctgcccactgtgcctgtccacctgtggctacagcagctgagaccccagtgggctaagattggacaggggccaccagggacccagcaagtccttcagctctgtgagtgagggattttccggagtgccaggccgcagtattcccagggccggtgggggtgggacagggaggctcgaccccggcaaatcaggcagaggcgccccttgctccctgcaacatcgcccacgtcctggggccacagtgagcatgagcggagggcgggagcaagagccaggggacctggcctgggtccccagcccaaagcctgggaagctgcctacccacccctgtgtgggcgcggacactggggactctggcttccggtggttcggccacctgattcagtttatgctctgtgaggggagctggagtgttggcaggactggcccacctgcaggactgcaggactgcgggaacggcggtagatgggtgctctccttcccagtttgtcctgggaagacattcaataactgtttcattacaaggggcatttggaaaacatacttcaccttctgttgtgtattagccaagaacaaggtgtgatgtgacttcccaattattggggatccctttgtcccttcttgaaattagatgtcttcattcttgaggttttgcctggatgacctcagcacaattggtacaaaacctgggccaacggtttcctagtttcccggttgttgccttaagcttctcgcccatcaggtaccttcctgtccttttcgtagcctgtcatcatcatcccagaaaactgtttcaactcctacagctctggacaggctgcttttcattttggtgggtccctccaatacctccacttgccctgtttttctccagccacatccttggcctcttccacagtccttaggtaaatgcttggaagaataatttaaatatttttattctaccatggtggccctagtttctcagggggtagtaaaatggctttttaggatcggtctaatcagatcctcatttcttttcccttcctagatttttgaaacatgaatccttcactcctcctggctgcctttttcctgggaattgcctcagctgctctaacacgtgaccacagtctagacgcacaatggaccaagtggaaggcaaagcacaagagattatatgacatggttggtggcatctgaaactgtccaggggaacaccagagagatgggcattgctattgggatcatatggccagagagtggcttctagaggctggctcctaccaataagctaacacaataacttaatagcactgattatgagcacgatatgggcatacacccttgttgtgtctcagcttggaaaacatctcctagaagtgtcaagccttccctggccatggttactcttacatctctgtctgaagattcacttggttagcatatgttgggttttaattagaaataaatagcattggcggggcacggtggctcacgcctgtaataccagcactttgggaggccaaggcaggcggatcacaaagtcaggagattgagaccatcctggctaacacggtgaaaccccgtctctactaaaaaaaaatacaaaaagttagcatggtggcaggcgcctgtagttccagctactcgggagactggggcaggagaatggcatgaacccaggaggcagagcttgcagtgagctgagatcgtgccactgcactccagcctgggtgacagagcgagactccgtctcaaaaaaaaaaagaaatgaagaacatcagttacatgtttgcctttagaatgaagaaggatggaggagagcagtgtgagagaacatgaagatgactgagcagcacaatcaggaatacagccaagggaaacacagcttcacaatggccatgaacacctttggagacatggtaagtatgctgtgggctgcccagctctgtgcttcccctcctcagttctttaccaaattaatctcttgcttcttaacattttatttacttttctttgaagaccactgaagaattcaggcaggtgatgaatggttttcaataccagaagcacaggaacgggaaacagttccaggaacgcctgcttcttgagatccccacatctgtggactggagagagaaaggctacgtgactcctgtgaaggatcaggtgagactgtgttaggttcagacctcccatcaccccaggaaagccaagaagcaattgacatttgtgctatggtagactgtgcagcaacatgcagttcactttttttttttgtataatttttttgtttgtttgttttgagacagagcctcactctgttgctcaaggttgagtgcagcggcgtgatctcgcctcactgaaacctctgtctcccagattcaagagattatcctggctcagcctcccaagtagctggggttacaggtgcctgcctccccttccagctaattttttgtatttttagtagagatggggttttgccacgttggtcaggctggtcttgagctcctgaccacaggtcatccacctgcgtcggcctcctaaaatgctgggattacaggcatgagccaccaagcctggcctgtttttttttgtttgttttgtttttgttttttttttttgttttgttttttgagacaggtcctgctctgtcctgcaggctggagtgtagtggtatgatctcgggtcactgcagcctctgcctcccaagctgaagccatcctcctgcctcagcctcctgagtagctggggctacaggtattcaccaccactacacccagctaattttaaaatttttttttcgtagagacagggttttaccatgttgcccagcctggtcttgaacttctggggtcaagtgatccgcctgtctcagcctcactaagtgctgggattacagctgtgagccaacacatgtggcccttcatataattttgaccttttaaaatgtattgagaattgttttgtgacctaacatatgatttatcatggggaatgttccatatgcacttgagaggaatatatattctgcacttgttagatggagagctttctatatgtctgttaggtctagttggtttagtgtgttgttcaattcctctagttccttattgattttgtctagatgttctatttactgttgaaggtggggtgttgactgggcgcagtaggtcaggcctgtaatcccagcactttgggaggctgaggtgggtgaattgcttgagcttgggcatttgagaccagcctgggcaacatggtgagaccccgtctccacaaaaaaatacacaaattggctgggtgtggtgctgtgtgcctatagttccagctactggggaggctgaggctggagaattgcttgagtctgggaggcagagattgcggtgagctgtgatagagccactgcattgaggtctccattattgtaaaattgtttcttccttcaattttattagtttgctttgtgcattttggagcccttttttttttggttcatatgtgtttataattgttacatcttcttgtgatttgactctcttacgaacataaaatgtttttctgtaacagtttttggcttaaaatctattttgtgtggtattattagtatagccaccctggctctcttttggttactatttgcatggattatctctttccatcttttcactttcaacaaatttgtgtctttgggtctacagtgagtattttgtgagttgcatatttggattatgtattacattattaaaaaaattgattctgccgatctttccattgatgagattatttacattgaaagtgattactgaaacagaaaagttacttgaccgggcacggtggctcccgcctggaggtgaggctgcagtgagccatgatcgcaccactgctcttcagcctgggggacagagtgagattgactcaaaaacaaaaaacagaaacttacttatggttggactcacgcctgtaatcctatcactttgggatgctgaggtgggcagattgcttgagcccaggagtttgagaccaggctgggcgacatagcaagactcctgtctctacaaaaaatagaaaaataagctgggcatggtggtgcacacctgtagttccagctactcaggaggctgaggtgggaggatcagctgagcctgcggaggtcaaggttgtagtgagccgtgattgtgccactgcactccagcctgggcaacagagccagaccctgtctcaaaaaaaaccaaaaacaggctggatgcagtggctcatggctgtacccagcactttgggaggccgaggcgggtggatcactagaggccaggagctcgagactagcctggccaatgtagtgaaacctcatctctactaaaaatacaaaaaattagctgggtctggtggtgggcgcctgcaatcccagctactcaggaggctgagaatcacttgaacctgggaggcaaaggctgcagtgagctgagaatgaaacactgcactccagcctgagttacagagcaagactctgtctcaaagaaaccccaaaaaagaaaaacagaaaaacccacacaccaaagaacttacttatgtcatcctgctgtttagtttctacataaagtgttttgctcctcagtaccttcttttgtgtttggttaatgatttatcctgtaatattttgatcctttcttagttccttttctgtatatttttaaagttttgtttttagtggatactatgaagatttcagttaacatgctgagttctaagtctagttcagactgataccaactcagcttcaatagcatacattaactctgctcctttctctgtcccctagctatattgttacaaattatgtctttaaacaattagttcctattaacatagatgcatattatttcatgcatgtttttaaatcataaaggagaaagaggaataacatacccaaaatacaataatactagcttttatatttagctatatagttgcctttaccagtgatttttattttttcatatagctctgagttattatcttgtatcttttcattttagcctgaaggactcacttcagcttttttttttagcccgagtcttgctctgttgcccaggctgcagtgcagtggcacaatctctgctcactgcaaactctgccttctgggttcaagtgattctcctgcctgagcctcccaagtagctgggattacaggcacgtgccatcacacacagcaaatttttgtatttttagtagagatggggtttcaccatattggccaggctggtctcgaactcctgacctcaggtgatccacctgcctcggcctcccaaagtgcagggattacaggcatgagccactgtgcccagccaagcattctttttcttttttttttttttttgaggtggagtttccctctttttgcccaggctggagtgcaatcgggtgtgacctcggcttactgcaacctctgcctcccaggttcaagcaattctcctgcctcagcctcccgagtagctgggattacaggcatgtgccaccatgcctggctaattttgtatttttttagtagagacagggtttctccatgttggccaggctggtctcaaactcccgacctcaggtgatccacccgcctcggcctcccaaagtgctgggattacaggcgtgagccaccacgcccagaccaggccaagcattcttatatttttattcatttattatttttttagtgacaggttcttgctctgtcaaccaggctggagtgcagtggtatgatcatacctcaccgtaacctccaacttctggtctcaaacgatcctcctgtctcagcctcatgagtagttggaactacagatgcacaccaccatgcccagctaatttttttaatttatattttgtagagacggggtctcactatgttgtccaggctagtcttaaactgctggctgcaagcaatcctcctgtctcagcctcctgagtagctaggaccacaggccagagccaccttgtctggctaattatttttattttgtagagatggggtctccttatgtcgcccaggctggttgtggactcctggcctcaggtgatcccacttcagtctccaaaagtgctgaagttacaggcatgagccaccatgctgagcttccccaaccctgtttttttttttttttttttgagatggagtcttgctctgtcgcccaggctggagtgcaatggcgccatctcagctcactgcaacttccacctcccaggctcaagcaattctcctgtctcagcctcagtcagctgggactacaggtacatgccaccatgcccagcacaccaccactgccttctatactccgtgatttctgataagcaactgttagtcttactgaagatcccttgtacaggatgaatcacttatctcttgctgcttttctgtctttagctttctacaatttgattataatgtgtgtcagtgtggatctctttgagtttatcctgctttgaatttgttgagcatcttcaatgtgtagattcacaattcccatcaaatgtgggatatttttggtcactatttcttaaaaaaatctctctaggccaggcacagtggctcacacctgtaatcctgcactttgggaggctgaggtgggaggattgtttgagcctgggagttcaagactggcctgggcaacatggtgagaccttgtctctccaaaaaatacagaaattagctgtgcttagtggtggtatgtgctatagtcctggtgccatattcccagctacctgggaggctgactatagctggtgctatagtcccagctacttgggaggctgaagggggaggattgcttgagcctaggaggtagaggctgcagttatcaatgagccatgagatcacaccactgcactccaatctggacgacagagcgagaccatctcaaaaaaaaaaaaaaaaaaagatagggatgtatctgcatgactatggattaggcaatggtttcttacatacaacctaaagcacaccaaccagaggaaaaataaattatgctttctcaagattaaaaaggagactatcaagaaagcgcaatgacaactaatagattgagaggaaatatttacaaattatatacatgataaaggtcaattacctagaatatatatacttcaaagactcatttagagacagggtcatgctatgttgcctagactagtgttgaccttctgggctcaagttatcctcctgcctcagccttctgagtagctgggaccataggcctatactaccacaactggctgtggagtatataaagaactcttaccactcaataatgtggacaaaacccaatttaaaaatgagcaaaggctttaaatagaataaaaatgaaacatttaagattgttgaaagtggttgcctctggggagtggaatatggtgaggcagatgtctggattggaggggacgagctattgtgaacaataaaccttgtatcactatttggctctctggatcacagttcacaacaagggatgaatttgctccacaggggacatttggcaatctgaatatatttgtcattgttataactgaggggtcttcctgacatctaatatgtagaggccagggatattactaaacatcctacaaggcagagagagcccccataacaaagaattacatagcctaaaatgtcaatagtgctgaggtgaaaaattgtctaaagtatgtttgaggctgggtgcggtggctcatgcctataatactaacactttgggaggctgaggcaggtggagcacctgaggtcaggagtttgagaccagcctggccaacatggtgaaactccatctctactaataataaaaaaattagttgggcatggtagctcatgcctgtaatcccagttacgtgggaggctgaggcaggagaattgcttgaacctggaaggcgggggttgcagtgagccaagatcccaccactgcactccagcctgggtgacagagtgagatttcatctcaaaataaataaataaacaaatgaagtatgtttgataaaaatacaaatacaagtcaataaaagttatgttaaaaaattaaaaaatcataaaacaatcttttgtacaatatccacagatttacttttctttctttctctctctttctttccttccttccttctttctttcttgcttgctttctttcttttttttttttttttttttgagtttcactcttgttgcccaggctggagtgcaatggcacaatctcagctcaatgcaacctctgcctctcaggttcaagcgattctcctgcctcagcctcctgagtagctgggattacaggcatgtgcctgcttagtgggggtataagccctccttaccaagtagagaaaaaggggagaaaatcacattgctaaagcaattgtgttaagccccatattatctttacttgtggaagaatgcagctttgacctattattcgacacttagcacatataaaattttaggccttagctttcagttcctcagatcgtagcaaattgaagtgttaggctaacaaattagcttacaggcaataacagaaatcactgactgcactactactgacggctacagtaagatctctgataaaaacatgttaagtgatgctcactcaaatccgtaaaggtgcagaaatactcctctcaaacatagtaaaaataaaaacaatctaattatcttgtatgtcaattaaatgaactatggtatacctatgcaaagtactaaacagccattaaaaaggataacatatgcatgtaaattacttggaattatcacaaacatacatatggaaaaaggcaggtttcatacaacatgtataacatgttcccacttacaattttctttctcttccccattctttctccccaccatatatatattgtttataactttctatattatttcaactgtataatagaaactcatctttacaaaaagaaaaacacaactttaaaaatggttaaactattaggctggatgttgtggctcacacctgtaatcccagcactttaggaggctgagagtggatcacaaggtcaggagttcgagaccagcctgaccaaatggtgaaaccccgtctctactaaaaatacaaaaattaaccaggcgtgatagcaagtgcctgtaatcccagctactcgggaggctgaggcaggagaatcacttgaaccctggaggcggaggttgcagtgagctgagattgcgccagtgcactccagtctgggtgacaaagcgagactctgtctctcaaaaaaaaaaaaaaaaaaaaaagaggttaaactattaaaccattatgtccccccataaaataattaaagttctttctaaggactgtactcaattcttcctataaattttactttttagtcgacggaatcagtatactgtaatgtttttctttaactcaggggcccaaggcctagataatcaacttctttgaacaagatgtgatatattggatacagggctggtataagacaactttgaaatgttcaaggactgctttttataccccaaccctctccacctcccacctaatctgtaactctatgtcttagcacccttcccttagtcaccttaaaaatctcatgaagtcaacaaggacaacaaaaaacttaaaaacagaaaaaatctcatgaagtctaacctacccaaacctatccttcatgagaagtctaaccccacacagcacttggaaggattaatgccatattctagcctcatccactgacaaaagggctctctggtgctctccagctcctgtttgctcactttccattcctttagtgacatacctctgctggaggtcagtaaaactttgtttaaccactccttttctcccaatgtacaaatgacaaattggtcccgaatctttctagaggcatctacgaaagtattatgcttgctttaggattaagtaagcttgttacctcaaacaacaattccaactaggctggggcagtggcttacacctgtaatcccagcactttgggaggctgaggcaggaggatggctcgagcccaggaatttgatacaagcctgggcaacatagtgagatcccatcttgattaaacaatatattttaaaaacaaaaaagctggctgggcacggtggctcacgcctgtaatctcagcactttgggaggccaaggtgggtggataacgaggtcaagagatcgagaccatcctggccaacgtggtgaaaccccgttgtagactaaaaatacaaaaattagctgggcgtgatggcacgcgcctgtagtgccagctattcgggaggctgaggcaggagaattgcttgaacctcagaggcagatgttgcagtgagccgagatcacgccacggtgcaccagcctggcgacagagtgagactgtctcaaaaacaaaaaacaattccaattggagaagggctctggcaagtggcaagtctgaagcacacagtttgtaaatcacaaacatataatgataaaatccttctcaaaaacagtctatacatgttaaacatgaaacagcttcacccacccaaaacaaaatcacaaggtatcaattattaggcttactagttttctgctccatacaaaactaatgtattgggatgcacagattacaagtagctcctgaataacagatacgttcttcttttttttttaatttttatatttttgagacggagtttcactcttgttgcccaggctggagtacaacggcatgacgtcagctcactgcaacctctgccttccaggttcaagcaattctcctcccttagcctcctgagtagctgggattacaggtgcccgccaccacgcctggctacttttttctatttttagtggagacggggtttcaccatgttggccaggctggtctcgaactcctgactttaggtgatttgcctgcctcggcctcccaaagtgctaggattacaggcatgagctaccgcgactggcctaacaggtaaattcttatatagagagcacggtctgaggcagaagttcatcttttttaaaaaagcaacttttctaacagcatgtgactatagagtaggagatgaaagggtaattttggtgcacagagatataaggggatgagaagggtggagacatcagggtcctgcagaactttacataggtgatatttacactcacacaagggaatgaacaccgacctttcaaaagcttttccaaaaacagaagaggaaggaacactcctcaactcattccatgaggctagaattgtctggatacaaagactagacaaagacatcataagaaaaccatagatcagtgtcacttagaatagcattaaaaggaatacaatacttagttgtaagacttctacaatgagaactacaaaacatcattgaaagaaatcagagacctaaataaatggaaagacatctcatattcagcattggaaggcttaatatggttgagatggcaatactggtcaggtgcagtggctcatgcccataatcccagaattttgggaagctgaggtgggaagattgcttgattccaggagttcgagaccagtctgggatacgtgatgagaccatgtctctacaaaaaattaaaaagttagccaggtgcagttgcgcacgcctatggttctagctacttgggagggtgaggtgagaggattgcttgagcccaggaggtcaaggttgcagtgactgctgcctggtactccagcctgggtgaaagggcaaaacccttttggggagggtggggaagatggcaatactccacaaattggtgtgcagattcaatgcaattcctatcaaaatcccagcctctttttttttgttttgttttgttttgtagaaatttacaagctgatgctaaacacacatgtgataggatcagggctcaggctcaggtctgagcctcaatctgacactctctgtggagtgtcaggaaataacagataaatagcatcgaatttgaaggtttgccgagaagtgagagaaaaaactccctttgcctgcctcctaggcttcaaagctgtctgggccaagacgtcaatttagctgcatcatgggtcaatgaggcctttgcgaattaggcaaataaatcaagttactagagtttaagctgtgttttctttcagtattccaatgaatcactttttgacctttggaattattaggtacttgtcaagactgataaaatttagctggagatattgcagatatgggcgataaatatgactgaataaagtctgaaaccattcaagactataaaatgtgtttgagatttaggtgaggaggaaagaccttttgaaaattatgaaggctattaacaggctgaacatgacttcaattcaccatatctcagaatcggtaggtactcctataaaagtgtgagtgagatagttcactcatgttaataggctcctcgtaatgatgcacaaattcacagtagtgctgggtatgcggcacgtcaaaggcccaaatgccttttattatgaaagacaggccaaatctagtcaagttttagagttacctatacttactgtatttctatattaggttatttcatgacatttatttcatgacttttttcctaaaaatgaatctgaatagctttatttcttttctctttcttcttgagatgtggtcttgttttgtcacttaggccagagtgcagtggcatgatcacagctcatggtagcctcaacctcccaggcttaagggatcctcccatcttagtagttgggaccacagccatgcaccatcacgcttggataacattttcattttttgtagagacggggtctcgctatattgcctagggtggtcttgaacttccgggctcaagtgatcctcccacctcagcctccaaaacctccaaaaatgctgggattacaagcaccagccaccatgcccagactttatagtttaatttcataggcatttgtccatggtgggggaaatgctgagaaagaaagtagagaaaaatacactttatttcctatttaagtagaccttattttgtttaactatactgatactgatagggcaagtattatattattaagtaactattaacattctattaactatactgatagggcaagcattttattaaataattatgtatattctattcaaacaaattagaagccttctagattaaaaatatatgtatagaaaggtttaaactgcctgaaaattagaaggtaaatgacaaatatttacatatcataggaaagaatgttcagatcacacacaaagaacatataaacacagataatagtaagatacgaagacatcaagcaaacgaagatcagtgtcttcaaaaatgttgtatgtttggcaaaagctcctatcacaaatagtaggaggccgggcatagtggttcatgcctgtaatcccagctctttgggagtctgagatgggtggatcacccgaggtcaggagttcaagaccagcctgaccaacatggcgaaaccccatctctactaaaaatacgaaaattagctgggtgtggtggcacatgcctgtagtctcagctacttgggaggctgagacaagagaattgcttgaacccgggaggtggaggagattgcaccactgcactccagtctgggagacagagtaagactctgtctcaaaaaaaaaaaaaaaaaaaaagatttttttagatgttcccactttatgccaaaatctatgtggctacacataccaataaagcccttctttgctagctccatggtgaacctccttgtgatcttttccagttcgttatcctgtaaaataagaaaacaataaaaataaaaaaagatacaaaaatcgcttgagattatagctagcatcttattttctatttatagtacattttcatgtcttctcatccttagaacaactcataaggtaggcaatgccattttaaaggtgagaaaataagggatcaaaaaagtaggttataaaaacaagatagtagaaccaggactcaaattcccattctattaattccccactgaaaaatataccaaatcttaattaagattaattgtaatataattatattccatctaaatggtgaattttaaagagaataaaaatcatatctgtttatgtttgtatatagataatttagtattatgtaaagcattgtgacaaccagtttgaatttacttggaactgacaggataaaaagtaaggtttttattggcttagttaagatatttgtcactagcatgagatcctgaactaaaaacttcagatcacagtactacttttcttctttctttttgagacagagtcttgctctgttgcccaggctggaatacagtggtgaaatctcgtctcactgcaacctctgcctcctgggttcaagcagttctcatgcctgagcctcccgagtagctaggattacaggtgtgcgtcactatgcctggctaattagatcacagtgattcttttttttttttttttttgagacaaagtctcgctctgtcacccaggctggagtgcagtggcatgatctcggctcactgcaaactccacctcccgggtttactccattctcctgcctcagtctcctgagtagctgggactacaggcacccaccaacacgccggactaatttttcgtatttttagtagagacggggtttcactgtgttaaccaggatggtctcgatctcctgacctcgtgatccgcctgccttggcctcccaaagtgctgggattacaggcgtgagccaccgcacccagccagatcacagtacttcttaaatatgggtataggtgtctaataatatgaagatattaattaccttttaaataagaaaataataatacaaaaagcaaaaaaaaaaaaaaaacaagactcataaaaacaaaaccaaacaaagcagaaaatgataaaggatatagatattaagtaggtgacctttatatggcaaaacactcaatgagttaattctttacttttttcattccatttgaaaagcaatggggactattgatttcactgatatgggggatacagagaagcccagtaatttcaagtccttcataaatgcactgtgtgcacaaatatcactttgaggccgggtgcggtggctcatgcctgtaatcccagcactctgggaggccaaggtgggcagatcacctgcggtcagtagttcaagaccagcctggccaacatggtgaaaccccctctctactaaaaatacaaaaattagtcaggcatggtggcatgcacctgtaatcccagttactggatcaaggagaatcgcctgaacccaggaggcggaggttgcagtgagccgagatcgcaccgttgcactccagcctgggcgacagagcaagactctgtgtcaaaaaagcaaaaacaaaaacaaaaacaaaaactttcatacttacggtatagttcttgggatagatcttaacaccagctttagcacccccaaacggcacatctgaaagagaaggttgatggttgctattccatataaaggttaaaaaagtaaaatgacagaaagcgccacacaatattagaaaaacgtgtgatgctttaagcttgaatttctgaaagttcaagaaataaacctaccatcgttttctcaactgtactttaaacaacatttattgaacaggaattgttcaataaaattggctagccaagttctaatatatatatataaaacataataataattaaccaataataataaatacttaaacctctaatccatagattgcaaatgcaacaatgatagcttattttcttggggaacaagagtgggtggggacagagggaacgggaacaggacttttgctgaaaggagggatgacaggaacacagggctgtgggtgaaaagaagaacaaatagaagaaacagcagagaaggcggctggctggggtggggcgggcgcctccctggccctgctccaggactcaggactgggtcccgcctgggccgcccctcctgccaagcccctggcctcttcccagggtgactggcccactcctagaccctaggacatctgaagggcaggagtcccaacggcctgagagggtatgggccaggagcagcaggctgacccatctgggcccaaaagccacctgtgtttgggggctggaatgctgtctagaaagagggcgccctgggaaaggggcgcacgagagtttctctcctgagaggcccccatgcaggtcgggtcaacaagggggctttatctgccttgaggcagcgctccctaagtgaagcaggcctaccccagaagcacgggggcttggctggcgcctgaactccctgtgcaaggcagcacctgctcatggagcccctcagcctgcaggtgcacacctggtttccaagtcctgcctggggccttgctaggtgggggacggacctggaacaggaccctaagcccaccccctcctcatacctggcagtccagggctccccgcccagtggagccagcacaggctagccaggcccccctcctgcctgacccccggaggccaagctcctctcctgcagtagtgccgccctgccagtcaggtagctctgggggcaggggcaaaggagaagggagggccgcagccctctgggaatggcctttctgaggcactcagtggctggactggggctctggcaggagttggggcattaataacacccccatcctcccctgggctccgcctcatctgaccctccagaaccccctgccccaagcccctacacacactgttctattcctcagcccctctcaacgccctggcaccatggggcccaatgcatgtcctcccctgagagggaacagctctggggcaacgggcagcggggtgccctccctgccaccaagatttggtgcctagagctggtggagggctggccgcacctctctggggcacaccaggtcctgctcccccagcctatggctttggggcggagcccgaagggagagagcaggggcggtgggtgggggaagaagggggtttctgcggctcagtttgtggcaagaaagttttttttttttttcaactttctcttgtgtaaaaagttcacgaaagctcggcagcctctgcaaatgtcagcagtgttttctggggcgggggatcagggaggggccccaggcctggcctgcaacttgcgactgaaggtggcctcttattgcttagaaacgtgtgtttcggtttaaataccagacagtaaaaatagagctcgaggaccacccgcactgttgccaaatcagtgccagaatgaacagcttaaataaataaaaaatcgaaatatttacttctggataaaaatcgcagtaaaaccatttgcctttctttgcattatatataatatatatttataactgcccagctgcgggcggcggagccgagggcagcggaggggtcaggacatctcgatgacctccacgctgcccgagaagctcccctgcttgcccagggcggccagctcctcgccgcgcgcgcgcccctccaccatgccctcctcgaactccatctggcagctgcagcacttgaagtgcgaatccggggccagctcgtctgaccagctggtccgcgcgtcccgggctcagcccttgctgcctcccgccgtggcaggtcgctgcagccgttgggttccggggcgcccgcccggccgaagggcgcaaacagcaccctgcccggcccttgcacgccctcggggctgaagcaccgaggacgcttcagggagtcgagcggtggcgtccaggctccggggctggccggctggccagggcccggcagccgcgtagccgaagttcaggccgcgcgcggggtagcgcgccgggccgtgggcgtgcctgggcgcggcgtccgggcagggcgagggcaggcccagcatggccccgactggctgtccagctttcagagagcttcggggcctcgccggggtcgctgggcccgggccgccgggccgcctgctgggggcgtaggccgacttgatgtccagagagaaggagggcttgaggcggctggtgtcctgcaggtggtccgaggagaggcgcaggctgcgcaggccctgctgcagcgtgctggtggccgtggggggcgccgggggcttcctgcccgcgctcgggccgccctccctggcagctgcactcctggtggcagcggtctctgaggtaggtggtggcagccatggcagtggggccccggccgcagggctggggggaggctcctgcattcctgagggggtgcccgcgtcgccctgcacggcggccagcagcttcgggctgctctggtcctccagcagctggcccaggaagttgaagttgggcgagatggacgggcgctggtccttcacaaacctgtaggcgtcttcggaggacatgcccatggtcttcatgatgtaggcgatggcgatagtggcacagcaggagatgccggccagacggtggacgatgacttggcagctggacagcttggctttatcgacgaactcgatggacttgtccagccagggcagcagcttttcacagtagttgtcgttgatggggacccgcaagaagtggctctggtagatgaagtcaggcttggggcaggagttgctggcatagaggacgtagcttattccattctgcgtcatcagatccttgttcaggacgtcttcctgcgagcccaggtagaggtgaggcaggatgagggtcaggcccacgctgggcacgagcaggcaggactgggagaggctcatgggtagcagggcagcaggctcacccttgcagaggtcggggaagcaggaggagaaggtggcgaagccccccgtgatgatggccatgctgtggaagcagccggccacgctgtggaagcagccatccagcttggtcagcaggatggagaggaagctgtctgcggccgcgtgctctggtcatagaccaccacgtcctgtggctcagtggcctccacctggctgcgtgcggccggctggatgaactccacaatggtcaccttgcccttctgcaaccgccacttcaccagcttggagcagcagatgttgacggagctgagcacatgccagctgttgtactccaggaaggagtgactgtcgatgaccaggcccccccaggcccgccccgcagcaggctggccagcttcttggcgtccatcaccttcctggggagccggtccccggccatgatggggcaatgggtcttggggagggtgacccctgaagtgaggaggggctgctccgacggcccaagtgtggcctcgcactgggaataacctagcacatgatgccggaccttgcttgcgctcacctcgggggtgctccgaggacccgcaccgcgctcaaggcgcccgctcggctgtgcagtccatgggccaggcgggggcccgcgcagctggggcgggggctggggctctaatatatatttaatcagtgctcttcaccactttaaaaagataatagcttatttactctccttctactataatttggtcttatttatagaatatgttgaggaattgaaaacaaagatctagacttaaaatccaattagctccctcccgtaaaaaaatccctcccgtaaaaaaaggctatatcttaatttagagtaattgagaaatgatgcaggtcttaaagagtacaacttaaaaaaaaatcagttccgataaggtatatttctatagcatcttaacagtaacatgtttgtaaacatatttccccagagttctcattaggtagcaagaaaagcgatcacctaccaaccactgcacacttgtatgtcatcagagaagccaaagcttttacttcatctacactcacatcagtgctataacggatacctggtggtgttttttaaaaaatgtgttggggtgggtgagaaagaaggggatatatttagaacaaatttcagtaagtttcaaaaaagaaagctacaaattgaaaatatccactttttacattttatacccaagctatgtccaaaaacacttgaagcagctcatacatcagaacaccataaaaaatgaatataaaacatttaaaaaagctgctaataacagtaactatgatttcacaagacaaaaatcaccctgcaatgaatttctgtacactttccagaaggcttttttatgttccttttacctttggtttgcgtgacctggttgcagggagttcaagaattcagcttgcttttttagggggtgggtaggggtgggaaacagggtcttgctctgttgctcaggctgagcgtagtggcacagacactgcttactgtagcttcaacctcctgggctcaggtaatcctcccacctcagcctcctgagtagctgggaccacaagtgcatgccaccatgcccagctaatgtttgaattttttgtagagtcaagatctcaccatgttgcccaggctggtctcaaactcctgggctcaagtgatcctcccaccttggcttcccaaagtgctgggattacagggatgagccgctatgcctggcaagaattctgctttctgataattcacaaacatgggcaatgaatagtcaccaggttcaaaataccgtatgtctaaactgaggttttggcttcaaatgggtatattgaaagagatccttacctgttattctcctcacccactgccaacctctttcaatttgaagatgagaaagccattttcccttcctgaggttgagtgattcccttcaccacttctgcaagaaggggaggtagccaagcagacaggtactagtgcccctgtatctagtagccattacgtgttggtatagggtatacagaaagtggcgatgcccactgctttggctttggggggtcttggtcaattacccttccaagttttggagtgctaagccacctttctttctctataatccattgcttctcaatcccaaggaggaaagtctgagcagggttgatgtttgactgcacagtgcttggggcactgggtgtttgtgtgtgaagtttacccacaagaagctgcagcattttttctaccctcccactctcaacagattcagcccctctcgaggggctgggtacgatttccactgggagtcacaggtaagtaatgggagcctcagggacagctcttttaaagaattctgagaataaaagtttttcagatagaaaatatacaatatctcagggactggcagtttgagagaacttccctagtcaattttaaaagctagcttttttatatgtttctgaaaacatcaaccttaatattaacaatattttaagagaatgtatttattatacagatcataaagagcatattctaagctgaacatacttatttggtctactgtaaaaacaaatcatatttagaggagtatgtgcttacaactatatcttatacataattgattctcaaattgtgaaataaatgtactcattaaacttttagaatgcaaaattacaggtaatttttctagcacacagcagatatctgtatagctgactcccccatctcattcaggtctctgttaaaaacttcattctgagaggctctccctgaccactgtatttaaaagagcacctctttctcactcccactttcctgcctctcctaccttacttgtttcttcatatcgtttattattactgactttgcattatacatgtgtttagtatctggcttccctacctggcaagttagcaccacgagggcagactttgttatgttcactgctttaattccttgttcctaacatagaaaatggcatacattaggcactcaaatacatgctgaattaatatacgaatattctgactcttaaaatttaaaaaagaaagaaaagctatggccacaaaaaattttgacatacatgtacttttaaataacttaccataagcctccatacatatcatgaaaggactcagtatacaacattggggatgggggtgatggggagatgatggtcaaagggcacaaagcctcaattagacaggaggaataagtttctttgagataaattgcacagcatggtgaatacagtaaataataatagattacacatttggcccaacatggtagttcacgcttgtaatcccaacactggaaggctgaggtgggaggatcacttgagctcaggagtttgaaaccagcctggccaacatagtgagacctcatttctacaacaacaacaaaaagtactgcacatttcaaaatcactgagtaaatttcagatgttctcaccagaaaaaatgataattatttgcaattgtttccagtagtgaacaggttaatcagcttgacttaattatgtaatgttgtattcataaatcataaaattactttgtacctcataaatatatatctacaatttgtcaatttacaatttaaaaaataaaaaaattgaaaggctttccagtcagatgaggcccacagaaaaggaaaaaaaaattgtaaataatattaagatgaatcctttgtatcttaaaaaaaattgagttgggtgtgggggcatgtgcccgtagtcccagatgctcaggaggctggggcaggagaatcgcttgagcccaggagttgcaggctgcagtgagctacgctcaggtcactgcactccaccccagcaacagagccagaccttttctcaaaaaaaaaaattgttttaacactaaaatgtgcttttcaaattattcaaaatgcttctaagtaataccacatatttaatgataactacactaagccaggaaaatagtcaggcgctgtgcccaggtgacccagcctgcaccatccgcttgcatggaggggtgctaacgccaccctcctaggatgggcgtcacaactgcgaggaacatcgcacatggggaatctggcacggtgccctgcaagtggtcaaacaggcaaatctcaactgttaccactgctataacaagtattacaaagcaatggcatgtaacaaagcaattaaaaagtctaaactgacaggagtttgaacaaatgacttaaaccttggtttcattacttctacataaattcacgggaagtggtaaaacaatgtattaattaagaactagtatttcttctcccacacataaatcacttttttcattgctcttttagagcctgtggaagtcatcactacattatttttaattttcctggctttcttaagtggaggaaaagttattttcttttaacttagaaacttaaaaattttaacttgcatttagcagggagctaaaaactgctggaaccaatgatattcataaatcaaacagaagcattcaaatggcaagcctaatattctagaaatagatgttactaaaaattaggaaccagacctctccttccacacaacagtgtaaacagaatgtccattttatcataagtcatggaatgatatgggtcagaaactgtgtgtgtataacaagagacatgttccgctggatggaacccaggaattcttgtttgtaaagttaaattttctttcccagctacacccatttagagagctcaacctgctaaacagtgaagagaagcagtttcacaaattacctctcacaccacaggcattttctgtaggctatgaaccaataaaggttcagtgaatggaagtacaggaggagctataaagaaagtaccagcttagtggaagaagccctggagccaacagagtagggacaaggaggggatagaagtgaatgcaagtgatattgcctgggctaaagaagacacattttcattttaaatttctagttaaccagtgatacacacgtttttaattctagaaattggcaaataccgagtactgggctacctaaactgttaatctgaaaaacaaaaaattttaaagtgcacccattaataaaatactctgcggcaatacttgagacaaaacaatctccaataagacacaatgtacccacaaacagaaaaagccagttactcttccttctctgggtttggaaaccaaagataactatcaaaaatatactgtcacctgaaaattcttaactacattctaaggcacattaagagatttaagtaaggaggctggatgtggtggctcacgcctataatcccagcactttgggaggccgagctgggcagatcacttgaggtcaggagttcgagaccagcttggccaacatggtgaaacccccatctttactaagaatacaaaaattagctgggtgtggtggcatgcttctgtatttcctagctactcatgaggctaaggcggtggttacagtgagctgagattgcactactgcattccagcctgggcgacggtttgagactccgcctcaaaaaaaaaaaaaaaaaaaaaaaaaaagtaagactccaaaaaggaagttactctacttaatggattgggaaaaaatagcacaactggagaatgtgaaggacaaaatgatgtgacatatacatacaaagttctgaaaggcagggaaagcttagccctttttaatgcccattcccattcaaatatactcaatttgaagttattcaataaagtcaaataataggtaaatacatatgcatacaagaaaatcagaaaatcttaaaatatttaatccaaaatgaagcaagaaggatcttatgtggtctgaatattgtcactttttataaaaccaagcctttcctccttcagcagagaaggctgaaggtgaacaggaccaacagagatcaaacaggggcacagaacagaaactagggggaggaaggaagagatgttttattccagaaatggaggaaagtaaattatatttttgtatcccaaagtcttagagggttaggcatggtggctcatgcctgtagtcctagcacattgggaggctgaggcaggagaacttgagctcaggtgtgcaagaccagcctggacaacaatagtgagatcccatttctacacacacacacacacacacacacacacacacacacacacatcttaaaaccctgttagactccattgatgcattactagtgtctgggatcaactgagtctttggtcaactgtgctagtaggaatgaaggtaaatacttttaacaaagagcaggagtccacggctggctaagctagatagtgaatgggctcggtacacaggtgtcggccacagagctgatgccattagacacatggcctaaaaatcaaggccaccctgctgacaaagtaatctgtgcatccagctcaccagaggaaactgaagacacaccacccatgacgtttattatttatctatctcagtaaagctggaggaagggctagggacagaatgacgtatgtactacaatgggaacttttaaatcattccttctattctgaacagaaaccaactaaacagttattttatgttaactggtatccagatgtttccaaagaatattagtgaaatgcagacatctgcaactatacacagcacaaagcactgatctgatttttaacttaattaccacagatattccttagtatgctcaagtctaatgagcagtgcatgctaagtttctctaggagaaataaaaatcaaaagcagaaactagcttaagttgctacagtgatgaagaaaacaaaccagctcattactttaaaaaagattcagtgaaaaccacaattgactaagcttgaatttttcttccttttcctagctgactcaaaagcaaacacacaaaagcctccagctagagtcactgttttttttttataattaatcattaacaaaacatttatgaaaatccaaatggttttaaaattacttcaacctggttctcttaatagggtttgatttattcatcagaaatctgatttccagctgtactctctcacttttcagcaactatttataaaataaccaagagttctaccacaagcacagaacccccagaaaagcaaaaaggcctcagaacaactcttaatattcatacgttaacactcttgccacttactcatcagatcatattttttcacttaatattaatgtactttctaatccacaataatgtagcgtaacttaatttaaaatgaggagaggaaggttagaagcagggaggaactattaatgaccacccgtaagtaatgaccatctgaaatactatgtctcagataaaaattcagacattcagcatggggaaggagcactgcatataggagctaagaaaaagtacacactttaggctgggtgtggtggctcatgcctgtaatcccagcactttgggaggctgaggcgggcagatcatttgaggtcaggagttcgagaccagcctggccaacatggtgaaaccctgtctctactaaacatacaaaaaaattagctgggcgtggtggtgcacgcctgtaatcccagctactggggaggctgaggcaggagaattgcttgaacccaggagacagaggttgcaatgagctgagattgcaccactgcacttcagcctgggtgacagagtgagactccatctcaaaaaaaaaaaaaaaaaaaaagaaagaaaataaaaattatactttaattgctttagcagcatcaatgtactgttctgtataaagtaggcaaataccatcttagatttttaattcattgtctaaatcttttattttaacctgaataaattttgaaaagacaactaagctttctgggaagcaaatgtttagctgatattggaaaaatataatgtagtgacagatcaagaaaaaaaaggaaaaatactttttttcattaaaaatttaaaattataatacatatgtatgtatttctgtcaaaattgaaatacaaaaagaaagctgaagactcccttgactaccacttgtgaccccagtcttctctaagtgtatatccttccaaatcatattccctgcagttatatatgtacatatccataaaacatacagctttcttttatgttaggtatttaacttacagcctgatggatggaagattatgcattaaaagggggatcttgttaatttttttggtagattcttttattctgatcttgattaacagtaaacttagttgcactttcacaccaaatacctcttggaaacggaaatgatgctagttaaaatggcgaatataaacttggacttagtaaaagataacagtaacttgttattaaaaactttcaaagggataaaggcttgaaacctcaggtatccagtttcatgtaaattacttacaagtctaggtgatatttgagatgggtcttaagagaggaagaggaatcctagggagggggaggcgaggcatggacaggcagaaggactgcactgtgcaagggcatgatggagagaagtacatgcctagttttccagttttcctgaggataattttacaccagatcttctttattttaaaaatccaatcctttttcttaataacccctgtctgtccctgataccaccattttttttctaccagtctctcaggctagaaattttgtagttatctttgcctcttctctccatcctgtaaatcctacctgttgggaatacattactgtcctttcttcaaaatgttttatctgtcttttctttttcattctctgctattaagtataacttcattctcagttccactgctgcctagctttctgtgtcctgctaggttcatcattatccatccaacaaacataaaaggaaaactgtttctactcacacacttctgaaaccaaatgtgtgggttttccacactaagcagttctccagttctctctgcagatacaaaccgggtgtcctgcaattcacttctgaattgccatcaactaagatcataagactgctgagcagttggtttgagagggaagattctgagttctgtagggcatatcactttggaaatgtccattaaacatccaaatggatatgtcatggaggcagctggagttcaggttagaggtctgagtcactgataaaactttgggagttgttggcaaatgatagcgtattggtcagagtccgattaggaaagagaagccacacagtcatttgaacaggaaaagtgtacctagggaattgttaattgcaacagggaagtggagtaaccaggcacagactagtaggaagtataggaggagcagctactagtctagggctcaggtagagaactcaggagagtcctcccctcttagtgccctgcccctgcacctcatcagaggaacccagccatggccctctgcttgtcaggagagtcaccgatgctataccactggaacttactagaaatacttccttaggtgctggggaaaggagcggtgtctcagaagagttactctataataaaactgcctggagctggtgagaggagtgggacctgctgggcactggccactgtgtccctggtgaagtcaaccgcctgcaggagccaggcgagggagcataggagaaccagtagcaaagacagctttcacctacaaagtctctccattgctctagataggaggtggtggtcagagtgggatactgtgagggttgcagtccttggacctgacaaggtctaaggtctgatcatggagggagggggaagctgaggtagggcagaggacaagaatgggcttcatgagaccaaaaggatgttagaaagattatttacccggctactgacatctccaagaagtaagaggcctagtgtgaagaagttacaacatcctaagctcttcagggataagggaagcatgcgccacgtaggtagcctccctagtgcagcacccagtatatagcctatgcagagtgaatacctgggggctgctgggggtgataacaaggtcactgtgacaggacctgaagcctgggggtctcggtgacaggagtgggcctagttttttgatgtagaattgagccttgcatgcaccggtgggatcatattgaaaagaaaccctccaagactagaggaagatgcatcctctgacaatgtagtctctgtaggcgtcccaagtagctgggctggggattagatgggctccaaggcatttcctcaggtggcaatgggtggatccctgggaaggcaaagctgtgcaggaagaaaatggcaagatgctaccttccctcagggaaagcccctttcccgggagcagggaaggcgaggcagtttaggctgggtcagtttgtccctgccctcagagtctgttggtcccggaaaaagagggccttattttatttatttatttttctttgagacagtgtcttgctctgtcgcccaggctggagtgcagtggctcgatctcagctcactacaacttctgcctcccaggctcaagcgatcgtcccgcctcagcctccagagtagctgggaccacagggaccacagggaccacaggcgccctgccacgacgctggctttatttttatttatttatttatttatttatttatttatttattttttgagagatgtagcctccctatgttgcccagattggtcttgaactcctgggctcaagcaatcctcctgcctcggcctcccaaaaggctgggattacaggcgtgatccaccgcttctggccaaaagagggctatagggcacccccagaacgcgagatctccctcgtctgtcatctttacagaggaggaagtggactcccaatccagccatagtccattcgccccgggcacggtgactccggggcggccagaaccaaatgtgtctcctggcttttgcacggcatcaagtaacccgcgccaggccgcacagctgccctggccttcagcaaggactccgcgagcgaggtgcaagctgctggggagtgccacagcaggagctgaggcagcggattccgagggcggggtggggctgaatcgggagggacgcggacccggtggaacgcactgcgcagacggcgccggcgccagcactcggccgttgacgagtctttcttccagctgtcccctgaaagtcatccaggcggcggtccctttttttctgcctttttgtttccctccggcgagtcggcgcgagggtgaatttccgtttccggcggtgtccaagcggacctaaggagtcgcagttgtgaacaggtttggtgccgcgggctggggtaggcggcggttgggtccgtggctctggggcactgggaagatcgcgagtcgtgcgcatgggaaggtcctcccccggtcctccgggtcatctttgctcccgaggagcggcatatttcgcatctgcctgaggtgtgcccgggggtcgttgggagagtgacgggatgaatccctgcagagagcccggactgggagggaaggtgtcggggagacgtcgtttcctggcgacgtggtcccggcaggcgacttagacctgagccgaatctgttgaccccaaattgtgcttttcccaccaagaagaaaagggagagaaacagtacaagttcggcagtaaaatatagtagagaagcaatataacctctgaaatcacacagctattcagtttcaaagcgttcctagtgcccagctctcctaactcccggccagtgttccttgacatatggtgatatataaagactttctgtttccgctcgtgtgtgtgtctgtgagaagcctctgactcacttctgtgctccagtagcaccctctgcagccttgcaatgtagcccttattgcatggcacggaagatactagtttggatttcctctgccaatcagaccatagctatatccattttctggcacagtggctagcacatcatagacagacacaaacatttattaaacggaatgaatacaggaccttaactgaatgaaatggtaccctgccccgctttttctcaatcaagctgtcagattttatgcagcccgatattccaaaaaaactcacagattcagtgactaccaatttattggccacagattcccaggtacctcagaaatcactggaagggtctctgtaagtccatggggtctccaggcatcatctaaaaccagtcatatctcacacatacagatattgctatttttcaaatgtatgtagatgagctgtaatttagaagttttagagtcaacaggtactaaaagtaatactgcgatcctattggaagttcataaaaacgttttaaattttttattgaaatttaagttctggtttaagttaggaaaccacttcgttagtccagtcgatgtctaggtctgagctgtccagtatggtagccacatgtgactatttagagttagaatgaaattaattaagaattcattttttcagtttctctgaagtacattttaagtaaccacatgtggctaatggctaaatggctgaaaagtacagatatagaatatttccatccttgcagaaataggtactggtgatgttgacacttgagatgaataaaaagtaacttaaccatagaatgtaaccttagcagaggtaactcatctaatttatagcataacagagagaaatgaaattggggatggttaagcagtttctacccttgttcagtgaacaaatacatcatgtcttcataaagaaataaatgaaatttaatgtttttccctgggtattgcctggattgtaaaatgcttctcccacctccttaccccaaccttcttccttgtaggttagagttacttgttattggtaaatagccactatggagactaaggaccagaagaaacacagaaagaaaaacggtggacccaaagctgcaaagaaaaagaagtggcatctgcaggatctccagctaggagactaagaaaatgcccagaagagaaatgccaatgcttttgcagttcagtctgctgtgtggatgtctcgatcctttcacaggtgtgtttagctacagtctgatggttcttccattgaatctttttaaatagttaggagcctctcacaggtgacatttggattcacaagtctagtccagctccaaaggacatggagatgcatgctgtgtggcttttactaaaacgtgagaagacttgccatagaagctgccttgcctccagcatctgcacactggttggcgtttcttgcccaagatacaagaatttatagaatttgattcttcctaaactttaaactgtttctatggtgataagtgtgctttttccctctggatatgttttacaaagttgtaatataaaatacaaaaattacaatatgtaatactaacatagctttatttagtgagtccttatgatattcttagcagtgtactttaaacgttattcaactaaatccttccagcagccttaccagagtaggaatcattcttgccctcattttatggacaagaaaactgaggtcaagaaaacaagttacctccaatcatacaaccagtaagtcggagagccaaatttaactccagagcctctgctcttatctgttatgatgcactgcctcagtatttaccttttggtttttaaaaaactataaaaatcactcataaagcagtcagatttaaggtgtgtttaattttcaactctatactattgaagtcatcttgttacatctttattgaacagcaattgatttggataggggtcagaagttaataattgacaagttacttatatttttatattgtctgttgtactctctataaaatatactaaagtactcatatctgtaattatactaaaaaaaagtctacttataaggttgataccttttactctattttaaaagtgagtttactttttttttcttttttaaataaataggactctggatttgaagacacaaaagcatcatattccagtggttgatggaactccactagagccgccaccaataccggtagtggtgacggggcctccaaagttggaaagagcactttgatataatgcctcattcggaacttcacctggcagaagttcaccgagatcagaggccctgtgacgatcgtgtcaggtaggagatggtgccacagacacagacttggcgtggctgttgtcatctgagggacatgcgtgtgtttgttgttttcttgagtggaacatgttaaatattgtcatatcatgttacctctctcttacttttactaagttagctataacttcataaaaggataagttcccagagataaggatgtgatacataccttatcctgactgctctatggctttgccaagcatgttccttggaagggcctgacaggcctggtcactgcgaacacaccatttaacagacagcacgtacctcctatgtgccaggtgcacatgcttgcccttatgaagccacatgctggtggaagtgcgcgttttctctttttcctatgagaatttgtctgctttgggagatggtgacctttccaagtttgagggaagatgaaacaaacgtccagtggtagaatggcaatgtacactctgaaatctcttattattgcagtaatatagttggattgaggcttttctttatctttggcgcatccatattttattttcctttttttgagacagagtcttgctctgtggcacaggctggaatgcagtggtgtgattacagctcactgcagcctcaacctcccaggctcaagcaatcctcctaccttagcctcctgagtagtgtatgccaccatgcctggctaatttttcttttttttccttttttttaatttttatgtttttgtagagatgggatttccccatgtggcccaggctgatctcaaaactcctgggctcaagggatccacctgccctggtctcccaaggtgccaggactacaggcatgagccactgtgcccagccaatattttcttgatcattttcttattaccttaatttagaaataattatcattgtaaatattctgttgcattatgtttgaggatgtttttagcgatagtgggaatacaggaaattttgatagaggtgaagacattggcctgcagctgaacagcaagatcatggttatcgtggagcctgtctagtcagaattttccctgttttgagcacttttattcatctgggtaggcttttgatattatctaaatttagaacacaggaagaaaaacaggatggaatttattttaccagtttttgcctataaaaatgaacttctggtacactcctgtaaacgtatgtggtgttttactggatgcaattaaaaaatgaaaattaagagttgatggttagagttttttcagggtctttttaaagtaaaattttcatcttttcacttataggtaaaaagcgcagactcaccattattgaatgtgggtgtgacattaacatgatgattgatctggctaaagtagcagatctggtaagtgagcaggggcagcctggggtgctgatggagacttacagcattgtggtaggttatttaccccgtgatgaagggaagagagttttgtgattattaaaaggatcatggtcattatcagggatatagtagatgtgattgaattgatgatgataataatattagtaataaatgttgtcatattaataatacaaatggaatgtgcacaatgaaatgtgttccaaaatctaaaagcaaatcacaggatggagaaaacctttaatgaacacagctaataagagctcattaacattcatacatatatatgtacaaatatatcatagtaagtaccatttcttcttggatccttcctggcactgtgctaactgctttctacaaatttagcttacataaacccttgatacacccttgaggtgagtaggtattatctatagtttacataagatgaaatagagcctcccagcagttaagtaacttgtgtgaagatgggacccttgttcctgatggttctagaaccttcatccttaatgataatgctaaagtaagtacatgaattgcctgaagaagtggtcagagtttatcaatagaaaatttagatagtactcagcgtgtggaaaatgtacatttatggaaatgataatgttcactatctctgatattctatgatcttttacattagcaaaaaaaagaaaaaaagaaaaaaaggccagacacagtggctcatgcctgtaatcccagcactttgggagaccgaagtgggtgaatcacctgaggtcgggagttcgagaccagcctgaccaacatgcagaaaccccgtctctactaaaaatacaaaattagacgggtgaggtggtgcatgcctgtaatcccagttacttaggaggctgaggcaggagaatcgcttcaacccaggagatggaggttgcggtgaggcgagatcgtgccattgcactctagcctgggcaacaagagtgaaattctgtctcaaaaaaaaaaaaaaattagcaaaaaaataagccatattgattaggaggtgtagggtgacagataccttgtttttttcatttttatttagtttttgctagagctacagattttatactttggcctaggaagactcctaaaatataaaggaaaaagtaatacagattttaaagttgtgccattgtaatgtcagaaaactaaataacattcaaattttgaacatgtaatgctactattagtaaaaataagtgtaattaatgtaaagttgtgtaaagattactaaacttgtatacttgaaatgattgaatagttcatagaagtcatttgtttctcttttatttaaaatgtagcaagtttctaattttaaacacatacatattaagagatgcatttacatttttttagttttagttattatggatacataatagttgtacatatttatggggtacatgtagtattttgatagaagcatacaatgtgtgatgatcaaatcagggtaattcagagatccgtcacttcaaacatttatcatttatttgtgttaggaacattttaatttcattcttttagttattctgaattatataataaattatagtcaccctattgtgctgttggacactagaatttattctatctaactgtgtttttgtacctgttaacctttccctctttgtccctccctccctgctccccttcccagcctcttaaccatcattgagagagatgcctatgtaaatcttaagattttcaaaaggagcacacacatttggtaaagcactctaactgtaatgcacggtacacacaatgcgcattttctctttccttgctgtaacctctggtctctcaggtccctgcagacctttatatatatgtatatgtatatgtatatccttccagatacatataaacacacatgccaccctttaaaaacacaaacggtagcttattttatacactgttctatgctttgcttttttcatgtaatatatcttgaaggtgtataatcagtaagtactgtagctctgcctccttctttttaatataacattccattctgtggatgcaccataatttatttagtctagcttatgttgattgctctgctctgggttgtcaaagcctcctgagtacagcagaggcacacacagtacgtggatttgggtgtgtacgtgcgtgtgtggattaggggagtgacactggcttagatggcaaagattggcagctgagggactgtttgctcccttttattcctgaccctacaaccagctgcttgtcccttggcactctggcatcagatgtggtgtgaggatattccacctgttctttgagctggtccagtgttgctggagagctctgcttgctgccttggtctgcagtggcagctgtgctttcctacaagcccaacttcatatattctgtggttttgggttttgaatgtttcctagtttaatcaaggatgggcatttctgtttccattttgtgttatttttagttatccatggaaagatagaaacagaactatctttagtattaaaattacaagtttccaggaatcagttctgaaattattttgcatctttgaagtgtcttaaattttaaaaattggtcttggccaggtgcggtggctcacgcctgtaatcccagcacttcggaggccaaggcaggcagatcacggggtcaggagatcgagaccatcctggtgaacactgtgaaaccccgtctctactaaaaaaatacaaaaaaaactagccgggtgtggtggtgggtgcctgtagtcccagctactcaggaggctgaggcagaagaatggcatgaatccggggggcggagcttgcgctgagccgagatcaagccactgcactccagcctgggcaacagagcgagactctgtctcaaaaaaaaaaaaaaaaaaaaaaaattggtcttatctgcttatattttcttatagactaccattcatcataatctttctgtttttttacttaattctaaactggtagctatttcaaatatttctgagcaattgagttatacaaattaacatacaagttagaggtttccattgtatacttcccagcaaaaaaagattttttttttttttctgtgaggagattgaaagaagaggttggttttctgtacgtatttaatatatttcattgattatcactttcttcccattctttggatgtcagagacctgttatttggcttaaaaatacattacagaaaacttcatttctttaaattaggatttcttaggtaagggccaggttagacccagccttttctgagttacttctcatgcattagaattcttaaaatggatgtttatatcctagtggccttgtcttatggttgccttttagagcaagtcagagggtggtggtttctctgtctgggtgatgcctgtgtagtcatttgatttagtctggagtgggacttttctgtcgagggccagatagtgaatattttcagctttgtggatcatatcttctgcagctacttagctctgcagttgtagtgcacaggcggccatagacaatatgtaaaggaattaatgtggctatgttccaataaaactttagttacaaacacaggtgatgggctggatttggcccgtgggccagttgccaacccctagtgtaggtggtctgttttggtagtttcttcgagaaataatgtgttgtgcttgtaggtactgatgcttatagatgccagctttgggtttgaaatggaaatgtttgagtttctaaacatctgtcaagcacatggctttcctaaaattctgggagttctcacccacctcgactccttcaagcataacaagcaactgaagaagacaaagaagcgattaaaacacaggttctggacagaagtttaccaggtaggaagagaaataattgttagacactaacagtataatcctttaaaaccagactaaagaggccaggcacagtggctcatgcctgtaatcccagcactttgggaggcagagtcaggtggatcacttgaggccaggagtttcgagctcagggcaatatggccaaaccctgtctctactcaaaaggcaaaaattagtcgggtgtggtggcatgcacctgtaatcccagctactagggaggctgagacgtgagaattgctcaaagctgggaggcagagggtggagtgagctgagagtgcaccactgcactccagcctgggtgacagagtgagactccatctcaaacaaacaaacaaacaaacaaacaaacaaaaagactgaagagacattactaaacatctctctaggaattgcctcctgaattccctttgtgtatgtgttcccagtctctggaaggtgtccctcaagagagtggttattctgggcctcttggtgtatctcatttgtctccgtacctgctgcaccaggcaatgtctgggtgttttggagtcgggacttaatagagtacatcagaagtttctcccagttacaggaccaggcactgccccttcctttccatactgctgtggtccatcggccacagaaccgtttctgtgctcagaggcctcacctccctctcctcaccatacttagacagatgcaccggcttggttgcagagcagtctgcctctgtgtggttctaataagtcctgaaagaatccagcaaggctctggaagcctcaggacagtggctttgctggaagtctcccttcttaggattgcttcttgtttagagcttttattttgttgcagtattgacgagaatttaattgaaatttaatttttaattttcctttaatgtttaggttgccaaactgttctacctttctggaatggtgcatggagaatatcaaaaccaagaaatccacaatctgggccattttattacagttatgaagtttaggcctctcatggcaaacttttcacccttatatcctggcagacaggtaaaaagtgattgtaaactttttcttcctgggccatgtatttcaaagctaaaaaggctagaaaaagaacagtgataggatttattttgtgcctatttgaatagtgggggtagaagtgcagttgatggaaaatgtctacttatatcattgctcaaagatgctgtgcctttgggagtaaattaattatgagatgtttaggaaaatgggaggacttggaagcatttaaggctacaggatgtggccccatcctacgttcagcctcggttttcagtgatgctgccttcgtgcccgggtgctggagtccttcgtgcgtgccttcagtttccttcctttgtgctcttctttgtgctgtgattttctcagcctggaataccccttttccacctgccagaatccaagccacagtacaaatcccagagcacaggctcaccctcttccagaaacggattttctgcatatgttcttcactcttccctgaccccaggtagacgtcgtctcccatctggtgtcttatggaatgaatgtcactttcagcctagagacacagttgtgtgcctgccccttttcctctgctggatggtgaacggtgcttccttatttctgcattttctagttcctaagtgatgtgcttagtggacaagagtgtgatgagtcattgacacatgaaaggaggtataggaactttggcattcgtttctgctgtatgattgagtttatttttctaggatggaagatttgacaaacccggaggatatccaaacaaacatcaaatgtgaccggcaggtgtcactttatggttatttaagaggagcacacttcaaagataaaagccaaattcacatgccaggtattctcttgttgtagaacatactagaattgcacataggattcttgggatggcttcatttctcaggaaaaatgaaaaatgaccaaacaagggaagatggccttgctggaggttttaaaagtaagccagctatgtgtaggcctgcaaaggtgttaccgaatccctcttctctgacctcttgtagctagagggccactgttccagtgtggcacaatgcccttctttagggtcatgggttaagcccttggactgtggatcgtttttaaccccccagtcaacagtagatacttactgacttcttgtcagttgaagctggctttttgggtcccgtcttccaggggtagaacattttgccatgagtgacatcggtttcctcccagacccttgtgttcttcctgaataacaaaagaagtgctgtttaaataagaaggagcagctggtttatgtgcctgtttctggagttgagggtgtgctgtatgacaaagacgctgtctgtgttgaccttggtggcagccacggttttcaggcatcagtgaggcaggagtctttgctctgaactctcattattctttcctaatctattttttaatcaaaaaaagtaatgtactcagcttttatttattgaagatttttctcttgtacttataataaaggcccaaatgcatattgtcaatatgtagaataaaaagaataccattttttcattgtaccaagcagaagagtcctgtcctccatgcctccttgatccatggccccagcgcgggcactgctgccagtgtggcacctgcacggcttatttctgtttctacaaaatcagtgtgctttccagctctcgtttgtctttttctttttctcaatcacagtggtctcctcattattttaaagtggatttccaatatttatttcttagttctgtagttgaattttattgggttaaaagcagggttatttaaaaatgttagaaaagctagcactgttgtagcactggaactgaggtttttctagctaggtgtttaggttatcaggttatatactcactgagctttggacaagtttaatggagatggggatccatttcaagctttgttataaggattttcttctctggtgtttgtggcattaagaaaagatctcaggaaatgtgtctaagataattttgagaaactgagtgaaaccagtgtctctccaggatctttgtgctttcctcacgtgccctttcttggtggccttgataggacaaggtggggctcacccatgagctggtccagagtctcatctccacctactccaccattgatgccaagatggcttcaagtcgagtgacgctgctttccaattccaaaccacttgggtcagaggctatagataatcaagggtaagtctgctttttttctatttttaataaaaagatatattacagaagattgtatcacccataattctgccatcataacacattttggtgggattcattctatgtcgttttgtttttctttgtgtgtgcatgtgtctctgagggctcttcacttacctgacattacaagggagtcttatcttgaaaaaaaatacaggatgcatttttcaacagacttcaaatattcctcaaataccacgccatcttccataggttgcttttttggtttttcagagacctgaggccacttggctttcttttgatggccgaaacactagagcagagtcagggagtttgtggctgtccagaagccacatgccttgtctctgaaagttttatttagattatgttgtattatctcccatgggtaggtttccactaatgtgtggcttatgtgaattatttttcagtctgggttgggaatttgtatacctttatgcttagtggatgtttgcaaaacattgattttgttgtattgatttatgactcccagtaaaatttatctgaaaatcttgagataatgtagtatataatttgttacaatgtgcataaactacctaccacagtgcctgacgtaatgagtgttattagctgttttcatttttgcatatccttctagtcatccttgtctacaagaatactctcttctaatatagctacaggtaaaatacataattttatttctatattctgaggattttttttctatacagtctttatgtaatcatgattttattgttaccagtgtttttttgttattgtggtttctttgtttttgtttttgtttttgtttttgttttgagataaggtctcactttgtctcccaggctggagtgcagtggtgtgatcttggctcactgcagccttgaactcccaggctcaagtgatcctcctgcttcagccccgcaagtagctaggactacaggagtgcaccaccactcccggctaattttttttgttctgttctagggacgagttctcactatgttgcctaggctggtctcgaactcctgggctcaagcaatcctcccgacttggcctcccaaaatcctgggattacatatgtgagccactatgcctggcctgttattcctgtattctaacttatccatcccttatggtatgatttttagttttttctaatttatgttttcatacttttatctattgtgctacgttaaaaagcttcatatagttttctttcatccagtgattttagccccctgataatcttctctatcagttatggcactggtgactcaaaatggatgttattcctctgtcattccttctaagtttgttacctggcatttttaacaaagagctttctcttctcccctttgtttcagcatcacggctgactaatgcacttgcgttttattccatgggttattttccatcactgtcattgtactttctgatgcctatgctgtcccagattcggctgcgggagccttcggcctgtctcctgtgtcccttcaactgtctctgttagtctttgagcatttcttactttctgacagaaccagaggatccaggctcattttgtcctcttcctgccttgggcctggactcagccatttctcttaaggatcatgcgtttttagcttagaaattaatcagctttccagaagatctataaaaccctaacttcccttttgagcaatttttttctaaaattagattttttttttaagggttattcctttattctctctataagttcttttgaagtgtggtgttagggaaccatgcctcagtttccttattaactcttccggtgtttatcagatcattttttccctacgctatgtcatcttaaacatcttaagcaattcattgacattttctgtttcttttgtattttcattgactatatttccagttctagattagctgattaatgtacaaattgaattattttgcatatccttggtgatataggctgttgatgccaaaggaggaaaaacaaatagacttgaaaactggtcgaatgcgtcagaaagccatttttggagatgattctgtgcgaacgtcttctctcctttcttgatctcttaatttttttttcttatccaaatatataccagctgattttgtctttctagaagatccaagatctttggtttagagatatattctcttaatgttaactggtattagaatactcttttctgtattttatttcgatgcattttaaaaatagaaatgattgtattttcttttaacttgtgaagtagagcatggcatacaaattttgtattctcattatttcaaaaaatttccttcttagtgtacaagttgtattcagcacataaagtccatccagctttgttgtagatgcagtgtgattattacatgttgataaggtgtgaattggagatgggatccaaaagtactgtacttattgtaatttttaagctaattgtagatttggtggtgaatattttactactgcaaaatgaaaacagcatttcatcagaagttgttttatggtctttcaggcattttattttatatctttgatgctttttgcccatgaagtatctcttttgtgtgtttgtgtgtatgtgtactgatttgctgtaaatttcacagtgctcattgtcagggatcatcagaatcaggcctaggcagagagctgagcagtactctcagtatgtctctgtgtcctggttgccgcatatctctgttgtttatttataaattggagagctctctgatgtgtaacaaaggttggatagatcagagacaattggaagacgaatcctctactctattgtcacctcttatttttctattcacacatgtcagatagagacatgcgtgttgtaaattattttgtcagaatgaaagcctggcagattaagtgatttcttctctttttgctgtacttgatatcgatctcttgttcatttcttgataatatgtttggttatttttgttttcattgcttttggtgtcagagatggctttggattccctgttctgtgtgctcctgtctggctcctgaacccagctggagaggtgtgtcaatcccaactggtgaagtactgagaggaagctacacaaaaggcagcaaggtgttaataagtgtacctctgacattttaaccacctctgacttttccatggaatggacaagtagtagtctctgtcagagcaatgttttaaaggaaaaaaagaaacttgaggtcgtaaactgtttattaatttatgctgttattttgtgtttactcaactcatttatattgacttgtaaattagtaatttatgaactactattcatcaattcattgcctacatgtcagcaaacaagttttcttcttaataaagaatccggtggctgggcacaatggttcacacctgtaatctcagcatgttgggagggcaaggcaggaggattccttgaggccaagagttcaagacccgcctgggcaacatagcaagatttcatctctacaaaaaaatgaaaatattggctgggcatggtggctcattcctatagttcaggctactcaggagcctgaggtaggaggatcacttgaacccaggagtttgaggctgcagtgagctatgatcctaacactgctctccagcctgggtgacacaccaagagaccacctcttcaaaaaaggaatctaggggcatcagtgtgtgcacacagcatggcttgtgaatgcggaagtgcctgtgtgcatagttgtgctcaagaatgtgttgatgattatatcttctcagcatgaaaaaaagttgttgttgtttttttttgagatggagtcttgctctgtcaccagactggagtgcagtagtgctatctcggctcactgcaacctctgcctcccgggttcaagtgattctcctgcctcagcctcctgagtagctgggactacaggcacacgtcaccactcctggctgattttttgtattttagtagatacggggtttcgccatgtgggccaggatggtcttgatcccctgacctcgtgattggcccacctaggcctcccaaaatgctgggattacaggtatgagccaccgtgcctggcctgaagttcacatttataaagatctctctacgtcttagatttgattcttcctttaaatatttttctcattgacatttgaaagcacctgaccttatataaaatgaagaattttcataactccataaaaggagaattatgacatcatctactatttctttctcttgtctcataaatctaaaccatcaacctgcttatttttgtatactgtcacactgtgtattccctgcattgaatgcctttctattgacattgtctgtaaaaattgtgggaagttttctgcaccctaaattttctgttatggggattagatatccagtatccatgtttttccaagtcttacatcagaaagggtaaatacagccctcacagcagcctgttgtttgtcctgcagttgtgtttccatcacattacacaaagcctctttgtcttcgtggttgtaccctgctaataagttttttttaaattatgtaatatgtgtatatacaaatacctatatgtatgtgtgtacacatacagctgatatctactgagattatgtatgcatgaactatagaattaacttgtaattttaagaaaataaattattttgtaaagataaatctcatgtttaagaaggggaattacaattgaatcatttagggatgcctcagcctaagcataatatggaaaaagccataaccaaaagtcattttagagtactgctaggttactcaacctatcatcacatttaattaaaatgtcagtttgaaccatggccagtcgattttcgttaatatgttatttaaatcaacttgtgaagtcttcattttagatatagaatttgtgttaatgaactggaaaataacattctattgcttggaagatgtgttaaagcctaaatatttatgactttgtaaaagaagaaaaccagctggtgatcagttggcattagtatataaggatgtactcatatttgataatagccatttttttctaacaagagtaagggagttgggaatgggaggcagagacagggacacagatatataaaaaattgtagacaaaactgtattgcgttctgagtatggttctgtgatccatggttcagtttgagaggttcctgtgtcccttatgagaagggacaggaaagccaggaggacaggagtatgtttgggcctgtgcctgtgcttccaccacagaagtcagcagctctacctttctcttttctcctctttatctaataattgtttcctcttcaaatttgggaaatgagcttaatcaaatatttgttgtgttttttgtttgtttttgaaatgtggcctcagtgtgtttgcccaggctgatcttaaactcctgggctcaagtgatcctccctctcagcgtcctgtgtagctgggactacaggcatgtgccaccacacccagctaagttaatgctaatgtgtagtttatctgattcagttttgaagggcggggtatatatagatagttatgttgtgtgtgtggtggtgggggtagtgtttatgtgtgtgtgtgtatatatatatttatatattactagtccattgctgctacaacaaactaccagtatgtcagggcataaaacaaatttattacactcccgtatgtcagagtgtgatgtggatctcactgggctaaaatctaggtggtggaaaggctaccttcatctctagaggctctaggggatcttttttctcgccttttccacattctggagtctgcctgcattttttggctttgggctcttctccactctcaccattagcaaccttgcatcccatgggcccttcttctatggccacatgtctctgtggctctttccttcccccttctcttccactgttaaggactcatgtgcttacttagtcctgaatggagacaccgtcatcatccacatgagcccactgtcctaatccatacaggctgctacaaggaaatgcattagaccaggtagcttataaataacagaactttgtttctcacagtcctggaggctgagaagtgcaagatcaaggtgccggcagtcttggtgtctggtgaaggcctgctttctcatagaggcttccttcttgctgtgtcttcgcatggtgagaggaacaaacaagctcccttgtgcctttaataaggtgctaatcccagtcatgagggcagagtctcccgtaaggcttaacctcctaatgccatcaccttgagggttaggattttaacacatgaacagtgacggaacacaacgttcattccatagcaccagggtagtctcctcatgtcaaggtctttacctgaatcacatgcatgatgtaccgttttcatgtaaggttctaggaatctgtggacatctttggggggccattattttgctgatcacatattacatattttttaatattctagactagtatgaaaacaatgccacttccattgctttatatacgtatctatatacacattgtctaatgctataattaaaaaaaagttgtagacacaaatatacccatttaaaaaaaaaattttttttgctattttacttcatactgccaactcctttttcctgaaactgcttcaactctggaattcttttttgctattagttttattttattgaaatattcatgaatgagcatacacttgtatatggatttaaaattcacagtaatgttctcatgagttcatctgtgaataacattttatagacaaaatgtctgcactaagacaagagaaagatctataattcctttgttctaaggtaccgccattcattgttattattttaaaataggagtgttgactgatgttaaaacacaaaatgggttcgggagtggtggctcccgcctgtaatcccaacactttgggagaccgaggtgggcggatcacctgaggtcaggagtttgagaacagcctggccaacatggtgaaaccctgtctctactaaaaatacaaaagttagctgggcatgtgttgcgcgcccatgatcttagctacccgggagactgagtccggagaatcgctggaacctgggaggcggaggctgcagtgagccgagatcataccagtgcactccagcctagatgacagagtgagactctgttcttcccccaaccccccaaaaaaacacaaaaagggataattggccgggcacagtggctcacgcctgtaatcccagcactttgggaggccgaggtggatggatcacctgagaccgggagtttgagaccagcctgaccaacatggaaaaaacccatctctactaaaaatacaaaaattagctgggcatggtggcacatgcctgtaatcccagctactcaggaggctgaggcaggagaattgcttgactctgggaggtggaggttgctgtgagccaagatcgcaccattgcactctagcctgggcaataacagcaaaactccgtctcaaaaaaaaaaaaaaaaaaattataactgggcagtggaattgaaaatgattttaaaaaatatccaaaatacctaaggaacttgtataaataaataggaaaaaaaaagagaaaaacatcaagaagcccacaaaaaagcagatttgtaaatgggcaatggattcgaatagacatttagccatagaaggcatccagttggtgaaaaggcatatggaaaggtgctcagcatcactgattatcaggaaaatgaaaatgaaaaccgccacgagtggtttagaccatagcggcatgcatgaaagttttcagacctccagttgttgggagtggctgaggagattggggagcttctgtctgagttggaagagtggagtctcaacaagaaccagcgtattctggacatgtgtgcgccctggagtgttcatggctggatgccttgtctacctgtgccttacagagtgacaccattgtggtgtggtcgatcagaggggcaggaggctttcagagggagtgggaagtggtggggcttggtttgtttgcccatggatgacagcaaaagtgagttggcttctcaagaacttttaccagtagcctgttttgctacaattctagacccagactggggtcccaaggcatcatagcccacagcttcttagcaagtgcatgttcagttggatcccccagctcagcctgggtcatccccacgttctgcctcttgggccatacatagctcagctctgtactgagccatcatcccatggtgagcaagaccccattcttggtcttcagtctctttccctgcagcatgcaatcaaggtggtggctggaaggggccaaggagccacatgtcacagtgccctgctgcctgaacaaggaccagaggcctgtggaacacatggctctcagatttctcccatttgatgactcatcagctgcccccacatggctttctagctcacagcagatctagccttctctgagcagtgaagatgggatgttttatggtcattttccctggtgtggagagcccaagtggagttcttcagcacaccctacaccatcccctcactaacacccccacctgtccagtcttacctgccttcatatcaaaagcactcagttaacccagagggcttcagccctgccctgcctgactttctaggaaacccctctctccacccaccctaatcagacactgtctgaaggttccccctcatcattttaaaaggaagagaaatttttctgacacagaggttctggtgaagtggccagctcccacatcacagggtgatggtggtttggactggaccaggatcagacagtgctgtcctggggctggccatctgataaggggctccagaaagggcagtgatggacccctgggaggctttctgctctcctgatcacaggtttttggtgagaggacctattggccactagggtgtctgcgggggtgtgtgtgtgtgtgtgtgtgtgtgtgtgtgtgtgtgtgatgtgtgtttacttggaatgacttctttcagcatgaagcccactgttttgctgaacgtatctcactgtttcctgaaactcagtacattcagctggcttaagggtcctggggcctcgctgtgtcatatttgcacaagcctagtgtctgtgcagactgtacactggagttcagttgtaagacccttttgatcccttattctgttcctgtaatagaaaagccatttcactcaatggaatagaaacccagatctaatggagagatgttctaatctgccatacactggggcagtggccagtgatttggactttgtggcacagatggaaatttccaggttctctaggtggtaggcagaggcctcactttttaagaaactcccccactccacccctgccaatgaggacattgcttagaggtatttctatcagtgttgagtagaagagatcatttcttggtgttgaatttcaggtaaggatgccagcttctgcatatcagggtggtgatgtttgggctgcgacaggtctagacagcagtctgaaagggggctcaaggaagtagctgtgaaaggcccctgggatgttttctgctcccctttctgcaaatcccctggagggagatcctgttagtcactacgggatgtgtgtgtgtgtgtgtgtgtgtgtgtgtgtgtgtgtgtgtgtgtgttcatcacttgttgcttggggtgggaagagacaacaacaacctacagaatccatagttctcagttcatctcccatcctagtccaatcatggcctaacatccttagctaccgatcgcagaggagactgcgcatttgtgttcatgtggccttggatgttggcagattcagattggtgccccaggcatctgtgctgtaactgcagtttcagcgggctcaggaccaggctaaagggcctccaagcttcctccagtttcctggtgcatgcatgtgcaatatgctcccctggcctgggtctttcctgccgcttcttgccagttgggtcagaactagcttattaaccagtttttcttctgagctttaatcgaactggctccaaccagttggaggcttgaaaagggctacgtgctagttatagatttttaaagatatattattattttagagtagttttgagtgtacagcaaaatggagtgcagagtccagagatctcatatgccctcaattcctgtatactctcgggtcactccaccaacaacctcctacaccagagccactttgaaacattagaaaatatatttgagcattcagaaatgtataaactaggcagccccagactgcaagcagctcagaggtcccacagagaggcttagggagggtgggggaagaattttatatggtgaatgtggaagaaaaagaaaatacttgattgggtgaagtggagcagtggcctcatttggaacattacagtggaaggtctctagttagatgttagttggtggtttctgattggttcttacatttccttttattatttacactgagtcaagttttggtttatttaaggaggaattgagtgcacggcagccacctcagcctcatggccacctgtttatttgattatttttaacagagaagatccttttaaaaatatctgttaccgtggctggagtgcagtgacgtgatcacggctcactgcagccacaaccttccagctcaggtgatcctcccacctcagtgctccccaccctgagtagctgggactacaggcatgtgccaccacaccaccatgctaggctaatggtttgtatttgtttgagagatgcagtttccctaagttgcttaggcttcttttgaactcttagactcaaataatctgcctgcattggtctccccaagtgctggaattacaggccatctaaatcttttatctcaggtttgccttgtgacaaaaggtggggtactttttctgacatgatgaggcagagaaaggtgaggtgggtgcatcctgtgcatatgattttctcaggtgatgggaatatggtgggctcttgcctaatgggatatattttctctttgaatgatttggcaagatatcagatgagagaagttgaataaatgttagaagaacatagaaaaaataggttatacacattgggtttctgaagaaatgatgtcattggagaaacaaaacttttattgatttctggaaacatttagggccaattttttgtgtaagtaatttgaatttatgatgatatctctgaccactttttgatattttttctggttcaggtgagtggtgtcattgagcaaacacaaagtcgggctcatccaaggatgagattttgccagagaaaggatgagcagcaagtcagggagcttaaggtaattatgagacagtgactatctaaaattgcttaggtagaaggagacagattggatttttgtgtgtttggtatttgggataagagggatgtgggtgtgtacttgagatgtgttgtttattttctctcttttttctttttttttttttgagagggagtctcactctgtcacccaggctggagtgctgtggcacagtcttggctcactgcaacctctgcctcccgggttcaagggattctcctgcctcagcctcccgagtagctgggattacaggcgcctgccaccacgcccggctaatttttgtgatttttttttagtggagacgagatttcactatgtaggcgaagctggtctcgaactcctgacctcagatgatccacccgcctcagcctcccaaagtgctgggattacaggcgtgagccaccgcgcctggcctgtttattctcttaagagagaaaatgaggggattaatggactgtagttctggacaaggtggaaaactcttaaagtggaagtactggggcaagtgctctgacagggtaggatggtgcagtcagtcccttcacccagaaatcagtagaatgttagcagttcagactcaaaccttgtgaaaaacaggtggtggaaaggaaatccctcacagcaactggcaccataatcaagacaatgtttacaggataaatggagttacctgctttcagccccaggtcgtagctattgtctgccctgctgatatgtgataataatttgtgatcctgttgtcttaaaatggggtcactcatctccagtagaattaagtccacagtgaagttgtccccccatccccaaagagataaacatatatgaatgaactcacgtgataacaactactgctgcctgggatcatgagagacctgaactgaactgataggaagtgaaaggtggctgagataatgagaatagacccatctgcagaggatcataaaaccagcaaagacaagatcttgtctaagatgccttcacaagctttgtccatgagaactcttaaggatttcaccagacctgttggctgctgctgtgatctctgcccaagaggagcctctgaccaacatccaaagggcttctggacccactggactcctctggaggtaccttggtctcccgatccatggctgtggttttttactccctttatcactgcctgtgtgtagaatgataattgcacaattgatagtgtgaagacctcttgataaatggtaaatctgagcatatgtatttggctgacatgtcattgtgaaacctcacagcttcagtcagtgtctctccaaggactaaacaatggaagactgtagaagatgctattcattaagatatcgcaagaatatggaagactattattcgcttctcatgggacaggacttttcagggcacctgaaaaaactcccatgaaaaatcacttttacaaaatgtcaagttatgatatccaagatgaaaccaatgagtcacaacattcacataatacactgtacaaccctgatctcttgactgtcatcaaatgtttcttacctctaaaccaaagtttcattttataatttaatttttctcattttttccattctcttagcttaagaaaagatcattacaaactttttgtaagtttttcatatatgcttgcaaagggtcgtaaaactttattgtgattattcttgctttaagctgaaacatccctaatctttctttagagattgtggcatagcatgttagtttcttttccatatccaattgttgtctgtaatgaatacagaaatacgggcactattttgtaactttaaatagacatcatctcaagtctacaagaattatccaaaatggtatttaatgacatttctaggtcttcagacactattaatgcagattgtagcctctaggtcctgaagattttactagatactggttactgaaactgagctttcttgaattctttttccttccactgtggtttcccgcatttcaacatatcacctatttttgtcctcaaaggttacttaaattttttccacagaattaaattaaatatgaatcatccctcctctgatttttgaaatgaccctttgcttcctatgataatgattcttctggtccgttttgtagttatatgttagagtttgtaaatagtcacacattttgcaactgcatgtaattttcttattattttttcctcttcctctaaaactgctgttatttcttttaactttttgtgggaaaaattaaacccatctttcactttgttgatatacttatttataattgaactccttgatttttgctcgaattgcttttcaagttacccacttttagggaagacattatttgggttttgtttagtgtatcaggctttttttagttagttgtatcaagaagtgtagacttttctatacataatatcctttttcccacagtatttttttttttttttttaagtctagccgggtgcagtggctcacgcctgtaatcccagactttgggaggccgagacaggcggatcacgaagtcaagagatggagaccatcctggctaacacgttgaaaccccatctttactaaaaatacaaaaaattagctggacatggtaacgggtgcctgtagtcccagctaatcaggaggctgaggcaggagaatggcatgaacccaggaggcagaggttgcagtgagccgagatcgtgccactgcactccagcctgggtgacagagcaagactccatctcaaaaaaaaaaaaaaacattctgttaaaataaaggtgatcaaaagatcttttcccaaacctttcctttaccagaaatagctctagtgtcacatggtcctttctcccttcttgcttttgtaggaatccaaagctaatctgtccctgatccggattgcacgcacctgtgccttttggggcccttctgcattagttcttccttctcttctaacctcaaaaatgtgttttttctattggctctttccctttaacatagaagtatactcacgcttttgttgaatcttgaaataaaagtcttcctttaccacatatctccctttaatactacatctctcttctcagccaaatacttgggaagagaagccctgagtttgtgtcattgttttctcacctccagttcactactttgcccactgcctgacatccagctcactcacacacacacacaagcccaatcactaagttgccatagctaatttgtagctttcctgccttcctggcaaaatttgactctgcattgggataatacatgtcgagtacctattgaacaggcactgtgctaggtgctactgttatagatatgaaaagaaggcatcatctcctttctaacaactcacaggagcagccattcctgattcatacatgtctcttgactcccagtgctcactttttcaagcttcacttaatgccgtgcaaatcaccctattctccaggtcttctttcttcccagttctccttactatacacaacttctcaaggcagtcacctccacacccatggcttcaattgctttctccattctctgagaacaatagaattttaaatggttttatttcatgtattagctttattttatacaaggtgcctcacctgctgtaaccatagattcaaagttgctccatgaaagtaataaatgaaaaatggtgattttttagcatgtaaattttaggaaatttccccagttacgcttaatggcttgatttagtgtgtatgttatttttgaaaacatatgttgggatgtcacaaatggacttagcctacagagatttatattcaacttttgaccagagagttccattttaatgtgacactgagagtaaaaaactatcttttcctccttacctatttctcttcctacattctcggccaggaggaaggcactgctacatacccagtcttccccagcagagcctgagcagctctgttttccttctacttcccctcttctttcacatctcatgaccaagcacttcctattctgtctcccaaatgatcacagactttttcctccacttttgtcactgccactgcccttagcattactctgcctttagagaaagtctcttaattggtttggttgcttccttcagtctttattatacagaccactacacgcacatctgacagagacttttcacctttttatggttgaatgactgaaattcccagaataaaattaaaaccaccccagcatcaaatttgaggtcaaatagaggtgggtttgtatcccaggttcatatactgtccagcagtatggtctcagaaaactgacctccttaagcctttgtttgtgtatctgcctaaactcattgagagttgggactatttcacacatacagtgcctggcatgtagaagggacttaatgttgaaagaaggggaggcattttaaaatccacatcaaaaaaatgttgttctgtttgggagtggtggctcacgcctgcaatcccagcactttgggaggccaaggcaggtggatcacctgaggtcaggagttcgagatcaacctgagcaacatggtgaaaccccatctctactaaaaatacaaacattagctgagcatgggggcgggatcctgtaatcccagctacttgggaggcttaggcacttgaatgagaatcacttggacccaggaggtggaggttgcagtgagcaatgattgtgccactacctgggcaacagagtgagactctgtctcaaaaaaaaaaaaaataaaaagtaaaaaaaattcttttaaaaatatacgaatctggctgggcacgatggctcattcctgtagtcctagcactttgggaggctgaggtgggcctgatcaacatggagaaaccccgtctctactaaaaatacaaaattagctgggcatggtgacgcatgcctgcaatcccagctactcgggaggctgaggcaggagaatcgcttgagcccgggaggcggaggttgcagtgagccaagatcacgccattgcagtccagcctgggcaacaagaacgaaactccgtctcaaaaaaaaaaaaaaaaaaatagtgttcagcaaggttgaagcataaaaggttaatagccagaatcatttatcaattgtatttctatacatctacaagacacaatctgaaaatgaaattagagaaacaatttcactgggcaacaagagcaaaacttcgtctcaaaataataataataataataatctacaatgtcatttcccatccaagcttgacttctacctttactttctgatatggttttgccatgtccccacccaaatatcatcatgaattataatccccataatcccgatgtgtcgagggaggggcctagggggaggtgattggatcacaggggcagttatcctcatgctgttcttgtgatattcagtaagtcctcatgagatcttatagggttttgttttgttttgtttcttgggatggagtcctgctctgttgtccaggcaggagtgccatggcacgatcttggctcactgcagtctctgcctcttgagttccagtgattctcctgcctcagcctcctgagtagctgggattacaggcatgcacaaccacacccagctaatttttgtatttttagtagagacaggatttcactacattagctaggctggtctcaaactcctgacctcagttgatccacctgccttggcctcccaaagtactagggttacaagtgtgagccaccgtgcccagctgagatctgatggttttatacatgtttgacagttgctccttcacatgttcccactctctgtgcggccaccatgtaagtcggacctgcccttctgccatgattgtaagtttcctgaaggacttccccctctgccatgattgtaagtttcctgaggcctccccagccatgtgaaactgagtcaattaagcctctttcctttaaaaattacccaacctcaggtgtttctttatatcagtgtgaaaacagactgctatactttctgataatcatgcttaagcaattggggaattcagactacctgggatcaaactatggccccacccttagcagtcatgtgaccttgggggggtttacttaccttctctgtcccaacaacttctgtaaaatctgtaacatgagattgtttctgagggttaaatgagcatagcacagtggggacactgtcaggcacacactacttgccagatgtcgagtattcatctttattgaaataggactgtggtaagccactttatggctctcgattttgtatgagaaaatcatgtttagtgccttgttagtaaaagaaagaaaatctgaaagtccctgccatggaaggaagaaatagcggggagaaaagggagttggtaagtttcagcatttcagagcttggagggacaagttaggtttctattttatggagaaggaggtggaggcaggatgggtcctaaggtgtcattcaaaacacacagccataactctttattgagagtagagctagggccccagggattgctgtgatcaagttgcggacaaaaatgaccactcgttggaagacaggagaggagtgtttagttacaaaagcagtcaacaattcaggtgtatctatattcagacagcaaataaaagttgttcaacttggttgctaatgggacccactctactgaggctttgtgtagaactcgtagaggaagctggcttcgaggaatgaactaccctgtgcttttcttaggactaaaatctcaggaagctggtgatgaatgaaaaccttagtcccattggcactgcacgaggggccaggagagcagcagcatcataagccacagggtggggcagccaaggcaggggcattctgagctgttggggaggggtggcaggcagggtggggcactgtgaggtgtcggggagggcattgtgaagtgtggggtggggcattgtgtgccacatgcctgggctcccacctggggccagtgggcttcagtctgtaggtgactacagaaggaggaggagctccgtctgttctctcttcaggcagttgttgtgtctctcagcgcttgttgggttcacaacctattaaataagccggctggtcttcaccctcccagacaagtcaactcaggggaggcagcagggtgcgggccttggcccgcagccctagccggggccggggccggggccggggccagggctggtgcccggggccgcactgtgaggtgggcaggcgaggagcgggaagaccatctctgcaagtgcagcatagcctcggcctaggacagcgggagtgcgtggccaaagctgtgagcagaggcacaggtggtggcagacagtagaggcgccccatggggaacatactgacctgtcgtgtgcaccctagcgtcagcctcgagtttgaccagcagcaggggtcggtgtgtccctctgaatctgagatctatgaggcaggagctgaggacaggatggcaggagcgcccatggctgctgctgtacagcctgctgaggtgactgttgaagttggtgaggacctccacatgcaccaggttcgtgaccgggagatgcctgaaggtaaggaggtgataggtgccatctaccctcggtttgcctctggctgctgctgtccccaaggttccctttgaggcatcccacacttcgagctcctttctgcttgtagccagctttcccgggggctggccaggaacaaaagctggctctgccttgaattcccaccccttagtctttccccaccgagtccagtcagtttcttttcacctcccctcccaatcgcccagttcttgctctctcatctcattctcccaggctggcatgggaccatttatttatggctcttgtcgaataagcagcagttgaataaatgagttgataaatttttataaatgattacgtcctttttcttttctccctctatacatatagctttggagtttaacctttctgccaatccagaggcaagcacaatattccagaggaactctcaaacagatggtgagacaacagtgtctgtagctctgtttattatcctgtgggactttgtttaggcttctttgagctattctcttccttttctcaataaaaactcaaatatcccaacttttcagtacccatcttaatttttctttgaacctatccagatggtacctaagtgaaggaaccaggtaagtgcctaattgtttcctttgttaaagtagccaaatctcaggacagttcctattcaaatatttggggatttcttatttaaaatcagaatggaggttgccacgggagaggctatatggtattcttaatgggctgctttaagtcaccttgatagaagctgcttagtttcttctaactgtaatttgaacacagaaggaaaaagaaaaaaggagagtgcttaaaataattgtgaaaggtataaaatgtcacagccggggctgcagaaaaatggttgtgtgtgtgtgtttggggtttctcaaaggagtttacctatgaggctctgattactttaaaattcttactttaacagaaaatgtgtctccagatttattctggtgacttaacagactttatttacctccttgttctaaaagagaggtggggattggttcacggtcaaaactttcaaaagacatgaaacgtcaacgtagacttttaatgtgtaatataaagattgcaggttaaaatgtcagacttccctgtaagagtgtttgttgccgtggctccccctttgtcccttcccctcctgacaatagcatcttgttcaaagataagaaagttacagttttggctgggcttggtggctcacgcctgtaatcccagcactttgggaggctgtggcaggcggatcacctgaggtcaggagttcgagaccagcctggccaacatggtgaaacgctgtctctactaaaaaagaaaatacaaaaattagctgggcgtagtggcgcatgactgtagttccagctactcacaaggctgaggcgggagaattgcttggacctgggaggtggaggttgcagtgagcagagatcacgccaatgcactccaggctgggtgacagagcgagactccgtctcacaaaaaaaaaaggaaagagttggagttttttagtctctacactgttggcagaggcaggggatgggagccggtagaaaacagaaaacaattagttggtttgcctctaaaattttgcaaagagatgaatctaagtaaaagtaattctgggtaataatatggttcttgaataaaaactgaaattttcaaaatagaaaacattgcatcataaacatattaaatccagttggcttattggtttcatttaaatgccagagatttcattactctagaggaaatgtcttatagctcttctatttaaactttggttgggctcttaatttttaaagaggtaggataattaagactcattatgagtgtgactttgtaacttggaagtactatcttcacatttcaagatatttaaggattgctttagaataaacaaatgcattgtgtgaattaattgattgtacctttatacacaaagcatgtaagtacttgtataaacttatactctgcttggtgatgtttggaaagcctgatggatgttacacaccagttagtagatgggtagtgttggatgagagcccaaaaatggctctttattgtcattctttaggattacaacacagtttatgtatgtctcacttggccctttccaatacaaataaggcctgtgtatgttctccctatgtattgctaatgaagaaatgaaaacttagagatatcacatgactatggaagacagctactcaagagaactaaggttctgtgtcctcagaatgaaatggaagtgacagatatgatgaatttactttttaaaaattttaaaaactctagaatacatcttatattttgcctataaaatagactgtcttttaaaacttactgccatcttgatttattttatgcaaagttgattttacacaactcaaagccaaaatttacctcttcttctttttttttttttttttttttttaaataaaggagggtgtcattgtgttactcatgctggcctcaacttcctgacctgggttcaagtgattttcccatctcagcctcctgagtagctgggactacaagcatgtgccatcttgcctggctctatcttatgtctatacattcatttcaatggataagaatcaaagtagagatagtgaaatagcctaaatgcagcagccgaataaacgagttgataaatttttatcaatgattgcatctctttttcttttcttcctctatgcatatagctttggagtttaactcttctgccaatccagaggcaagcacaatattccagaggaactctcaaacagatggtgagacaacattgttttttccgccaagagaaagaataaaagctcttgtttgatcaggttatagaaagtatttagaaaaactcatattggtttaaatttttcaccttttcacatgttcacttgtcttattttaatatgtgatatactttcctttagttgttatgatgttagtgaaaacgtgtaacctttttgtttatacattttgccatctttttatcaacacaattaatttgtcatgtgttggaggagtcatggatttctctttataattcttggatttatctttatttataattaatggatttatctttatttataatcccttttcccttgctccaaaaagtacactttaaagatgaatgatagaacttaggcttcagcttggttttcatttaaacaaattaaaaaacatagttgtttatcatcagggattgaatctgtgatttgggcctcctcttacacagtcctctgaccacattcatttaccacatccaagttcatgctactcaaaagttttaggttattaactttttcatttgatgtcatgtaaatttaaacatgccctactcctgcttatttccctaatgttatgttaaatcctcatttatttgccaacaagccatacacagccaagttttccagttgacttaaacagcaagaatacaagtgagggttctataatagtgtgcgaagtaatgcagcacagtaaaacacgggagtttgtaacctttgtttttatagtttgagtagactttgcccatcttgagtcagttatttctggttagaatttgtcttcattttttacattactataaagagatacctaaggctgggtaatttataacaaaaaagaggtttaattggctcaaagattttcaggctgtacaaacatggctttaacatctgcttctggtgagggcctcagcaaacttacaatcatgataaaaggcaaaggggaagcaggtggttccacacggtgaaagagagaggggaagggggaaggtaccacactcttttttttttttttttttgaaatggagtctcactctgttgcccagactggagtgcaatggcacaatcttggctcactacaacctccatctcccaggttcaagcaattctcctgcctcagcctcccgagtagttgggactataggtgggcaccataacacctggctaatttctgtatttttggtagagacagggtttcaccatgttagccaggctggtctgaaactcctgacctcaagtgatctacccgcttcagcctcccaaagtgctgggattacaggcttcagccaccgcacctggccagtaccacagccttttaaattaccataatgagaatttgcttattaccatggggatgggaccaagccattcataaggaatccactgccattacccaaatgcctcccactaggccctgtctccaacattaagggtcacatgttaacatgagacttggaggggcaacatatccaaaacatatcagaattgtatttcccagttccttccagagccatgggcttctcacacctagagagcatggaagcagtaaaagaaaagctattccatgtccctcactcttcggtggtaggaacttttgcctacaaggcccttccagcatcaaaggcagaggcagtgtaggaaacaaagcatggcccaagtccctcttggggcttttattattctggcctctttttagaggaaaaaaaatgattttttgagcttcagacaccatgtccaattaggtttgtatactcattttaacatcaaaatttaggccaggctctgtggcttacacctgtaatcccagctctttgggaggctgaggtgggtggatcacgaggttaggagatcaagaccatcctggctaacacagtgtaactctgtctctactaaaaatacaaaaaaaaattagctaggcatggtggcacgtgcctgtagtcccagctagtcaggaggctaaggctgaagaattggttgaacctgggaggtagaggttgcagtgagctgagatcccaccactgcactcgagcctaggtgacagagtgagactccatctcaaaaaaaaaaaaattaagatacgttactttccagttgtgtaaagaccgttttttaattttgatttgtttttagtgacatattagtagataaccactaagtgtggttcaagatgcttacagggattctgttgcatctagagataggtgtctggtcaggacgtagttcttagagctgttagctcttagagtctgataattaaagtaagctatgtgtaaatgcagaatgagagaatactaatggatcatggctcatatatgcaacagttaaactttttattagctaaatttttcatctggcctaatttttttacccttttcttttgtacatgaggattctttcatttgtatgtaatagaaacaaaaagtaaactaaatgaaaaactaagtttttagatttgacttatgaaattaatcatgccagataatttaaattataaattattgaaaattatttttttaaatggaattttgtctcattttacataggagtaatcagtaagatgttaacaactacttttattttatggtatttgtatcagaagtgaccagtttttttttttttttattcttagttgtagaaataagaagaagcaactgtacaaaccatgtaagtaaacactcaaatagttaagaaattgatagtttgacataaaaggatgtctctcttgatttctttaaattacaatgtggacctggtggtggtagcatggacctctttttgtggattttctaaatctcttctattttcctgagtattaaatttatccagaaaagtgtttagcttagcgtgtccaccttttaaagatttctgacatttaagttaaatttcaatagtctggttcaaaagatctgccttaaggctgggcatggtggctaacgtctgtaatcacagcactttaggaggccaaggcaggctgatcatctgaggtcaggagtttgagacaaccctgaccaacatggtgaaattctgtatctactaaaaatacaaaagtagccgggcgtgctggtgcatgcctgtaatctcagctagtcaggaggctgaggcagaagaatcacttgaacccaggaggcggaggttgcagtgagccaagatcgtgccattgcactccagcctgggcgacagagcgaaactctgtctcaaaaaaaaaaaaaaaaaaaaaagtgccttaaatatttaatcttatttttaatgaaagaacaaaaatagaatagttaagttaattgccagcactgtctattgactttctatcacagcgggtaaaagcgtatcttcctcgctacaccatgatcttatgtttctccctgtgtttcttccaattgtagcacactttttaattaaatcagtaatatttacatgattatgactctgcaaatattattcactgctaagtcatatggtgttttcactgtgcctctgcattccatgtccttcatcctgtctctgaaacagttctgaaatctgagcacttctgcaattctcctggatcttcttttttcctagcctatgttagtttatctatccaaatatcattaagtagcctctgggtgctctgtttgctttcacatccattattttttagcatgaagctaattttctgactatattcatttgcctattttctaatagctgtttttcccccaagtattgtagcatttatcacatgcctttcaaagatattttccatctgcaaaaacacatctgttcctttttatgtgtgtgtggggggcaactttctttggccttttgtcatcctagttcaatatagcgtgggtttccctagatatgctcaatgtctgcttttctgggctaactccttaaagtcttttgggatctcacgtaactgctgtcttgtgtgggatctcctgagtcctagattctgtgtttccttctgtcctgttatcgtctctagttgtacttgaacacattttcctgggtggagatgttaaaatccctcctctttgatagagagtacacctctaggttgaatctaaattgtatggttctgaagacattttgcagttgtgctcttattacagtgttgttcttgaatctattgccagtgtgtgatatgttatttacaaccaggttttagttatctgcggaagctttttagaatctctctctctaaggttctgaaattttataacagcttgttggggatcttttcattttattgaggctactaaacctgcagactatctcttcttgagaattttttttttattttctctgttacttttttactgatagtcttgttcttcagatgctaggctgcttagaccagtacacctgcattgatttttaatttttccccttctatttttttcagtttgtctttttattctagttctgggatattctgtgactttatcctctactatttctattgaattttatattttttgagagtgttttaagattttttttttaaagttttgctcctgattttgactggtcctatcaattccttttttctattgttttgatctcttttcttggaggcttccctccaatgtgtggtggtccctggcctgctttatttggaagcaggatttctgttaactgatagcactcagtgtgaggccttagaagcctgactagcttttcatttgggagacctcagtgtattatctggggatctttactgaagacatttcagtttcttctgagaaggatctcccaattttctgcctggaaagtaaaagcaggcctggaaaggaaaagcagagttagcaaagaaagttggagttccatttttggtgtacagttttctttatatctcaggtttaagccatagtatctctgagccagaaattctcaggtttgatatatccagagaacacacatctaagtttcttgtcagatggaaggacaggtagactttgggctctagttagagatttgcaactgaccttgctggctttttttttttacattttaccctactttccaaagtgccatttgcctgtaagttcacaacctgcctttagttctgcaagacaaactggctcgcttctgttccagtcactttctgtagtcagcaaagttgtgtttctgtgttatttaccactcctttgtctactttttatgtctcagcatttactaaaaattatctctgtcaaccttctgtgctggtcatgggtgtaacctttattttatgactaatgaggcttccagagggagacgaaataaatttgtggtcaatctattatatttaatccaaatttaggacctatgtttaaatcaaagtctaatttgagtataatgatattaagccagagaattttttaaattaatgtatctataataagcatattacacttttctcctaaggccttgtttaatattttcattcaaagtttatccactgccatatgcttcccattacttcacaacataaatggagctgttttcctgaatgcccaaggtgttagaaatatttaagttaattaagatttgttcatttttagcctggtcaacatagcaagacctcatgtctacaaaaaggttaaataacaaattagccaggcctcgtggcatgcgcctttcatattacctactcaggaggctgaggcagaggatcacctgagctcaggagtttgaggctgcagttaactataattgcaccactgcactccagcctgggcaacaaagggagaccctgtctcggaaaaaggaaaaaagttactaattctttaaaaacctatctaaaatttgtcctgcccaaaaggagagtgaaaaatatgaactttagtctttgttttattttatgtttgctgagaaaaatgctgtactttatttatttatttattatttccataggtttctgggggaacaggtggcatttggtgacatgactaagttctttagtgatgatttgtgagatttaggtgcacccatcacctgagcagtatccgctgaacccaatttgtagtcttttatccctcaccctcctcccagcctttcccccaagtccccaaagtccattgtatcattcttatggctttgcatcctcatagcttagctcccacgtaggaaagagaacatgatatttggttttccatgctgagttatttcacttagaataatagtcttacttccatccaggttgctgggaatgccatgaatttattccttattatggctgaggtggtattcctcatatatatatatataatatgtatgtatatcacagtttctttatccgctcattgactgatgggcatttgggctggttccatatttttgtaattgtaatttgtttgagttcctcatagattctggataatagccctttgtcagatgtatagactgcgaagatttcctcccactctgtggttgtctgtatactctgttgattgttccttttcctgtgcagaagctctttagttaagtctcacctatttgtttctgttgcatttgcttttgtgttcttggtcatgaagtctttgcccaagccagtgtctagacgggtttttccaatgttatcttctagaacttttatggtttcaggtcatagatttatgtccttgatccatcttgagttgatttttgtgtaaggtgagagttgaggatccagtttcattctcccgcatgtggcttgccaattatcccagcaccatttgttgaatagggtttactttcttcactttatgttttaggtggctttgttgaaaatcagttggctataggtatttgagtttatttctgggttctctattctattccattggtgtatgtgcctatttttatatcagtaccgtgctattttggcgactatggccttatagtatagtttgaaatcaggtaatgtcatgcctccagatttgttgtttttgcttagttttgttttggctgtgccggttcttgtttggtccatataaatttcaagactgttttttctagttctgtgaagaaggatggtggtattttgatgggagttgcattgaatttgtagattgcttttggcagtatggtcattttcacaatattcattctacccattcatgagcatgggtgtctttccatttgtctgtgtccatgacttcattcagcaatgttttgtagttcccaacggcatatcaaaaagataatcgggccaggcacggtggctcacacctgtaatcccagcactttgggaggctgaggcggacggatcatgaggtcaggagttcgagaccagcctggccaacatggtgaaaccccatctctactaaaaatacaaaagttagccgggcgtggtggcgctcacctgttatcccatctactcgggtggctgaggcaggagaatcgcttgaacctcggaggcagaggttgcagtgagccaagatcaccgcattgcatactccagcctgggcaacagagcaagactccatctcaaaaaataaaaaaaagataatccaccatgatcaaatgggtttcataccagggatgcggggatggattaacatacacaagtcaataaatgtgatacaccacataaacagaattaaaaacaaaaaatcacatgatcatcttaacagatgcagaaaaagcatttgacaaaatgcagcatccttttatgattaaaaccctcagcaaaatcagcatacaagggtcatagctcaatgtaataaaagccatctatgacaaacccacaaccaacataatactgaaagggggaaaagttgaaagcattccccccgagaactggaacaagacaaggatgcccactctcaccacttgtattcaacatactactggaaggcctagccagagcaatcacacaagagaaaacaataaaaggcatgcagatcagtaaagaggaagtcaaactgttgctgtttgatgatgatatgatcatatacctaggaaaccctaaagactcctccaaaaagctcctagaaccgataaatgaattcagcaaagtttcaggagacaaaattaatgtacacaaatcagtagctctgttataccccagaagcgaccaagcttagaatcaaaccaagaactcaaccccttttctgatagctgcaaaaataaactaaaataaaataaagtacttcggaatagacctaaccaaggaggtgaaagatgtctacaaggaaaacaactttagtatttttaatgggttaaaatgagaggcagcaggtacagcagaagtcagtgcgtgggcatccgcatccaatgggtactgcacctttgatggtaaggctttggttttgacttactaaattactaggtacgattattttctagtttttgtcattaaaccttaaaactactaagtaaccccttccatttcttgttaaatattgtaaaatttcatactctcatttatgctgactgacgttagattatttgtttctattttgtgactaccttaaataatacctataaagagtaaactgttagtagtgtttttgctgtaattaaatgtagtaagacttaccttccaaatgatgactgaattgtcaaacacttgtcgaagttttggatttactcaaaattctatgctcagcagctggaggtaggaagagtaagggccctcccttactcttatggagaggcatactttctcatgaggggaatactctgcaggaattagcatcttgtaagcagtggtgaattcaactaattagtgtataaaaatacattttttggtgtggctgccgacaaagagatccaagagggtagatggagtcgagcttgctgaagcaaggaaagagaaaagcagtattctaggcagagagcaggggtagagcaggaaaatggctaggtgcaggtcagatgatttatagaatgcaattgatcaagttttgaagtgaatgcaaagtattctccaagagtctcatttgagtcatgtcttggcagtcttatttaaacatgaagtgaaagttagattttttaagttgtcatttgtttttagggtgtgagagaatatttaagtgatactctttttatcctccacataagaaaataggactagagaaacctatggcttcctcacttgttggtggcctagcagccctggcacacagagcccctgaatctgaaacacttcttttgtaacaatatcacctgaaataatacgtttaggattagtaatttagtaaatgcattagtcttgtattcactgcaataaagtgctcttgtagcaggattatttaatacactacattttatcgtagtaaataaataatagaaggactgggcgccgtggctcacgcctgtaatcccagtactttgggaggctgaggcaggcagatcacgaggtgaggagatcgagaccatcctggctaacacggtgaaaccccgtctctactaaaaatacaaaaagttagccgggcatggtggtgggcgcctgtagtcccagctactcaggaggctgagtcaggagaatggcgtgaacccgggaggcggagcttgcagtgagccgagatcgcgccactgcactccagcctgggctacagagcgagactccgtctcaaaaataaataaataaataaataaattaattaattaattaattaatagaaattcttggctgctttttattgctgtagaaaaaaatatgaaatctcattttaaacttttctttctttttttttttttttttttgagacggagtctcactttgtctcccggcctggagtgcagtggcgcgaactcggctcactgcaagctctgcctcctgggttcgccccattctcctgtttcagcctctcgagtagctgggactacaggggcctgctaccacgcccggctaattttttgtatttttagtagagacggggtttcaccatgttagccaggatggtctcgatctcttgacctcgtgatctgcccgcctccacctcccaaagtgctaggattacaggtgtgagccaccgcgcccggcgaagccgacttttcccattatttttaacggtaattcataaaatccttgttaggtttgatgacaggtaccatattaagggcagcattttataacccatatcttaaacatcatctctggaagttgagagcctccaatgggttttctatagattgcacatgataccacactcaggcagttcatggagtgtaagacatatcttagtgctttgtcatttgacattttaactgagaaaaaaatacactttgataagtttgacttacacttcccttccccttcaggtatctactgagcgtttcagtcaacaatacagctcgtgttcgacaatattccttgatgacagcacagccatccagcattatcttacaatgacaataatatcgtgagtacaactatgctgccgagggacagattcctttattcggaaattatttcagccatttggttgtcctcttcagcaatcagcttaagaaattggagtcaaccatatattgatattcagattctgaatattaagtatcagtttctcttttaatcttagacgtcgtggtggaaggaaaaatcagttagcaaagaagcaaacccagaaacagtgtgtctttttgatgtctttatgcctttagacaatgttgaacacagtgagaaggataggttccctttattgaatgttttttgtggaaacttagtttttcaatgcatcataggcccaaatcagtgtgcactactttggacattatccttggaagaaggaacagcttttcttcttctggcaccacagtgtatctgcatttgaatttctcccattgtgcatgagcacctcgtgggccacaaagatgcgctttgagagcaccctgagatgaagtttattttaaaaggaacaacaaccaacaccaccaccagctccacaggggccgtccagtgtacattattctcatctccttgggttattagtcttgatttttagaacacagtttggaaagtgctaatttagaatattaatgtctttatctttaatttaacttttcattctgtaaacataactagcttataaacaattttgtttcaaatgcactagcctttttagctaattcaattgtcaataacttttacttcaattaaaagtggcaagtttacactcataataatgtcactttcctccctcccttttaacaatagttgagaggaaattgtgtttcaaacaaaaactgaactcaaactctgtctcaagtcctgagctttgggacctattgagtaatcactaaatgtctgtagtcagccaagtctcttaaatctttgagcacacatacacaaaaattactttgactagagtccctggcttcttctgagttccaaagattttgataagttagcatataattcaaaagcagctttgaagattaattttgctgaaactaattttgtgcttttttcctcattattctactttttagaagtctacttttgagagtatagtaagttttaatttgccaccagcaagtttgagaaataatcatttggtgtattcactattggtgaaataaagttattgaacaaattaatagggcaaattggcttcaagaagatatattgaaaaatgttttatcatgaatcagtagtgcactgttgtcagtgggataggtggaactcgctgagatcacttatgcaaggtttttttcaaaatgcaagtctgcaaatacatgtatcttcccatctccactttccctctatctctaggcactgagaagccttttaggaaaatcgggatggatgtgaggcatctttctgtgaagaaaagcatcccagaagattctgattttcaccccagctcaatcattccaaactttgctgctgattgaaatcacctgggaaacgtttaccaagaaccttgatgcccaaagccatacccaatactaattaaattaaaatgtctcatgtggaagatgaggcagatattaaagcttctcaggcgattttaatgtgcagcaaagtttgagagccactgcttaatttgagtttaggacgagaaactgctcctatttggtgggaccttgggcaagtcagttttaaggtttgtttccctgatctgtaaaacaagtgttgaattaaatgtcacataaggtcattggtcctttccagcatgtaactttaaattctgtgattttaaaattatttcagagatgaaaactacttgaagcactatagacatatccatctcacatgctaatgttacaggctttttaaaaagtgctaatattgtgtagacctattagtagaattgagatttaccttccctcagttgttttgagcctcactctacaaaattagctgggtgtggtggtacatgcctgtaatcccagccacttgggaggctgaggcaggagaatctcttgaacccgggaggcagaggttgtggtgagccgagatcacaccattgcactccagcctgggcaacaagagcgaaactccacccaccacccccccaaaaaaaaaattatctgggcatagtggcgcaaacttgtagtcccagcttcttgggaggctgaggcgtgagaatcgcttgaacctgggtggtggaggttgtgaggagtcaagatggcaccactgcagtccagtctgagcaagagagacagactctgggtcaaaaaataaataaatacataaaataaatcgcatgggacgaaaggtttcatcggtagaaaagcatataaaagggaaatctgttattatttatatattgtaatcaccaacagaaacgcgtcttctaacggcatatttccttgcattttggttctcatatttttgtaaaaaacaaagaaatgaaaacaaagtgcccttatggtactgttctgaactagaagatttgaatttcagggccgctaggagagtttcctctgccccccttttaaaaaatgtctgcaggcctaacaaatgataacatctattgttatgaatttgttttccttccacagtgtgaccttggagatacctcatcatatcacacaaaggtgagctttttagaaacctgtcttgttattctagctaattactttgcaagatatcaagctcagtgttaggtcacagctctagacatcataagctgtattgtgcctactaaaatatcgaagcaaattatttgtattttctttgttccttaagactctcataattcttaaatgattgagaatctcaaagagtatatgtttatattgattatattgatatttagtgtggtagaattatacaattgaaattttttcaaaatctatttttagtttagatttcacagccttaccactgttgatattatgggctagataatgctttgttgtgaggactgtcttgtgcattgcagagagtttagcagtattcatggcctctaccaactagatgtcagtagtaacccatgacccagtttataaaaacagaaaatattccttgagaacagtattgttaacagaagtttttcattgaaaaaaaacttttctacaacaaaaagttgagtaaaaagtgtgtcatttgtttatattatttaaagtctctcatgttgagcttaataggagacaaatggattctctagagctttctttgcaatttgcttcaaagaagcaatatgaggctgggcacagtggctcacgcctgtaatcccagcactttgggaggctgaggcgggcggatcacaaggtcaggagatcgagaccatcctggctaacacggcgaaaccccgtctctactaaaaatacaaaaacttagctgggcatggtggcacgcacctgtagtcccacgtattctggaggctgaggcaggagaaccgcttgaacttgggaggcggaggttgcagagagctgagatcgtgccattgcactgcagcctgggtgacagagcaagactctgtctaaacaaacaaacaaaaaaagcaataagctggtggggcgcagtggttcacacctgtaatcccagcattttgggaggccaaggtgggtggatcacttgaggtcaggagtttgagaccagcccgaccaacatggtaaaacccgcctctactgaaagtacaaaaaatggctgggcgtggtggtgcatgcctgtagtcccagttacttgggaggctgaggcaggagaatcacttgagcctgggaggtggaggttgcagtgagccgagatcttgccattgcaccccagcctgggtgacagagagagactctgtctcaaaaaaagagaaaaagaagcaataagatgacctaacctcatgcaaatatgtagttggtagaaggtgtatttttaaagttttcagacagttgtgggtatttgttaaaacactaaatcaaaacttcacaagtggtggtttcttaaattagttacggtggcattttacatattaataaatttattccatcagtactcattgatctttcttgcacagtaaatggatcttttgctccatacttgcatttataatatcatgcattagttacttggaatatattggtttatgttttattgtgtcaaaaatcacttttagtttaaccaccaatcttactttaacaggcctttaagtattgaaaagctgccaagcctacagtagaaggaacaagtttttcaaagtccacaggaaagcttaaattttatcattgggaacaaatacgtatttcccttgaagtgacaacctctcacttcatttatttttgagaatgatagttgaactggttttttagaccgagtttcactctgtcacttggctggagtgcattggcatgatctcagctcaagcaatcctctcacctcaggctcctgtgtagctgggaccacagatgtgtggcaccacgccaggctaattttcttatatgtttgatagagacacggtttcgttatgttgcctaggctggtcccgaactcctgaaggagctcaggccatctgcctgctttggcctctcaaagtgctgggattttacaggcgtgagccactgcgctggcccagttgtacttttaaataaaaatgatgttctgtgaaaaaagtgatttttcagttcacagttaaatcacggattctttaaaaacaaaaaaaaagcacttctcattaactttccacttattcagaatattagagacatgtcaagatttaacaacattaatttttattgcttcatcaaagacgttcttaagaaattcaggctatgttttttacctgtaggggacagtgaagaatagaatgactactaatgtaattggtaccactgccttgatttatgctgagaaaccagccattgtacctacttttgcttttatacaatcatggcaagtgtcaacgaaaaagcaggcaatgactttgtattactttcacaaatttttaaaatttttcatcagctttctcaggtttaattagtatgattcagaacagtgttggccaggcacagtggctcaggcctgtaatcccagcactttgggaggccgaggcaagtggatcgcctgaggttaggagttcaagaccagcctggccaacatggtgaaaccacatctctactaaaaatacaaaacttagccaggagtggtggcaggtgcctgtaatccctgctacttgggaggctggggtaggagaatcacttgaacctgggaggcgaaggttgccatgagccgagatcgcaccattgcactccagcctgggcaacaagagtaaaacttggtctcaaaaaaaaaaaaaaaaaaaaaaaaaaagaacagttatgacctcttaggccttctggaaggggtcttcgggatcccgagaggtccacagagcacatttggagaaccactggtttatacacaggcacaatgcattagttttacaaagtttaaagttcctcaaagactggcctcttaaaaaggtagatgagtttgtcattcagacaacagaaaatacataaaaacatcatgagagtatactacagagaactaaagagaaaggaagctaagaaatctgaatcacatttacatttattaaagtttactactactgctttgtagaacattcttgtgtttcaatgtgtggttagaagagtgaaaatatgtttggtttattgccatggcctgttagggagagtcaatactcatgggcatttctgactggttatcatataaaaggcttcacggtacagaccatgatgtgctgagaaagaagaagtcaggaaaccctctgcaagtcaggatccaggagaagaatttgtaaaaactgctttggtaaagtaaacaccaaagcacacaggaggaagtattttactcaacaaatattatactaagatattaacagtttttgaagtaatgcactttcttattttatagagatgcagatagatctttgagcatacctgatgaacagttacactcatttgcggtaagtggcacttttattgaggttgtattttcatcgtacacttgtatctgtttcatgctgaagtcaaagccatctttttttaaatcttccccatttcatgttgcatttagtcatcttaagtgttgtaaaaagaatgtgctggagtaagaactgatctgcagctctgtttagttagtgagctagtgtgagtaaatatactatccaaacaacagaaaatgtatctttttttttttttttttttttttttttttgatggactctctttctgtagcccaggctggagtgcaatcgcgcgatcttggctcactgcaggctctgcctcccaggtccctgttcaagcaattctcctgcctcagcctcccgagtaactggaattacaggcatgtgccaccatgcccagctaatttttttttcttttttttttttttgtaaagacagggtttcaccatgttggccaggatggtcttgaactcctgacctcgtgatccacccaccttggcctcccaaagtgctgtgattacaggtgtgagccaccatgcctggcccagaaaatgtatctttttaaaaggtaattgtgagctgtctataggatcctgcaagccactacccaatttttgaagccattcctcctcctgttccacacaggtttccaccgtgcacattatgaagaaaagaaatggaggtgggagtttaaataactattcctcctccattccaccgactcccagcaccagccaggaggaccctcagttcagtgttcctcccactgccaacacacccacccccgtttgcaagcggtccatgcgctggtccaacctgtttacatctgagaaagggagtgacccagacaaagagaggaaagccccggagaatcatgctgacaccatcgggagcggcagagccatccccattaaacagggcatgctcttaaagcgaagtggaaaatggctgaagacatggaaaaagaaatacgtcaccctgtgttccaatggcgtgctcacctattattcaagcttaggtgattatatgaagaatattcataaaaaagagattgaccttcggacatctaccatcaaagtcccaggaaagtggccatccctagccacatcagcctgtgcacccatctccagctctaaaagcaatggcctatccaaggacatggacaccgggctgggtgactccatatgcttcagccccggtatctccagcaccaccagccccaagctcaacccgcccccctctcctcatgccaataaaaagaaacacctaaagaagaaaagcaccaacaactttatgattgtgtctgccactggccaaacgtggcactttgaagccacgacgtatgaggagcgggatgcctgggtccaagccatccagagccagatcctggccagcctgcagtcatgcaagagcagtaaaagcaagtcccagctgaccagccagagtgaggccatggccctgcagtcgatccaaaacatgcgtgggaacgcccactgtgtggactgtgagacccagaatcctaagtgggccagtttgaacttgggagtcctcatgtgtattgaatgctcaggtatccaccgcagttttggcacccgcctttcccgtgtgcgatctctggagctggatgactggccagttgagctcaggaaggttatgtcatctattggcaatgagctagccaacagcatctgggaagggagcagccaggggcagacaaaaccctcaataaagtccacgagggaagagaaggaatggtggatccgttccaaatatgaggagaagctctttctggccccactaccctgcactgagctgtccctgggccagcagctgctgcgggccaccactgatgaggacctgcagacagccatcctgctgctggcacatggctcccgtgaggaggtgaacgagacctgtggggagggagacggctgcacggcactccatctggcctgccgcaaggggaatgtggtcctggagcagctcctgacggggtggacgtcatggcccgagatgcccacgggaacacagcgctgacctacgcccggcaggcctccagccaggagtgcatcaacgtgcttctgcagtacggctgccccgacgagtgcgtgtagtatctgttttatttgactgcagtctccttggtgcaaaaacaaaatgggaaaaataaggataactcagaatttcaaaaggaaatcacaaattcagctagtaatagcattttcagtacttttcgtaaactaagtaaatacacaaaatgttgatttttctgaccataagacatattttatgtccttttgccaaggtggatgtgttagtctcaggccctcctggccacattgcccaagtcacacaggcttctgtattatgtatttagataaaatgtgtgaaaatatatttgaaaaaaaatttcataaatgtgcattgatttttgtacacatggcacctctttttcatttttatttttatttttatttttttggacgatgttttgctctgttgccccagctggagtgcagtggcatgatatctgctcactgcaagctctgcctcctggattcacaccattctcctgcctcagcctctcaggtagctgggactacaggtgcctgccaccacacctggctaattttttgtatttttagtagagacgtggtttcaccatgttagccaggatggtctcgaactcctgacctcgtgatccacctgcctcggcctcccaaagtgttgggattatgggggtgagccaccgtaccaggcccatggcacctctcttaatttataaattgaactggatgtgaagtaataatgtcagctagttgagataagagggttacagttaggctgggcgcagtggctcacacctgtaatcctagcactttgggaggcctaggcggactgatcaccaggtcaggagattgagaccatcctggctaacatcatgaaaccccatctctactaaaaaatacaaaaaattagctgggaatggccaggcgtggtggctcacacctgtaatcccagcactttgggaggccgaggcaggcggatcatgaggtcaggagatcaagaccatcctggctaacatggtgaaaccccatctctgctaaaaatacaaaaaaaaaaaaaaattagccaggtgtggtggcgggcacctgtagtcccagctactcgggaggctgaggcaggagaatggcgtgaacccaggaggcggagcttgcaatgagctgagattgcaccactgcactccagcctgggcgaccaagcgagactccatctcaaaaaaaaaaattagctgggcgtggtggcgggcacctgtagtcccagctacttgggaggctgaggcaggataatggcatgaactcaggaggcaaagcttgcagtgagcagagattgtgccactgcactctggcctgggcaacagagcaagactcggtctcaaaaaaaagaaaaagagggttacagatcattgcacatggaaaatattcccagcagtaaccacttccattaatgtgatctacagcttttaaaaaggagcatctcagaataagatggtggtacaatttgcttattgagaaaggaaaaaaaaaaacacatgagtatattacaaagggaaaagaaggaatgtgatttctcatgattgaaagcttgatttagattgcatacagcttttgctacccaagaccaagaggctctggcaagacagggtggttttccgaatgccagactgaggtgccttatgaaggcagctgccgatggttccagatgtagagagataggtgatgcaggagggaaagctggattggaaaagggagagttttgtagacgggctacgctcattgtgcctttgaaagagcagagccggcagcctctagtcatcatttggatatacaggactagagcatgaatctgatgtagagctacagaatgaagagcaacagcagctgtttaaataccaagaaagtgtgtagaatgaaattggacaagccaagcatggtggtttcatgcctttagtcctagctacttcggaggctgaggtgggggaattacttgagctcagcagtttgagttcagcctgggccagatggtgagaccctgtatcttaagaaaagaaaaaataagaccaggtgcagtatctcatgcctgtaatcccagcactttgggaggccaagttgagaggactgctcgagtgtaggacttcaagaccagactgggcaataaagtgagacccatttctaccaaaaaaaaatcaagaaattagctggacatggtggcacatgcctgtggcctcagttacatggcatggcaggctgaggcaggaagatcacttgagcccaggaggtggaggctgcagtgacccatattcatgccactgcactccagcctgggcaacagagtgagaccctctctcaaaaacagataaagtggacagaaaataggtcagtaaggactaatcatttaagggacaagcccccagaagagtggctactagagtgggaggaggaaaagcagaaggagaaagagttgaagataggcgaggctgtggtcccagtgctgaattctgccaagcagtgacttgattcatgaacactcactggatgctgactctgtttctcttctgagtgctggggtagaggagaggagaggtggagcacagttcttgcttttatgagcttatgttctaggaagttcaagtatttttttcaggtagtatgaaatagcaggaagaggaagcaggctaaagggacacagagtgattgggggctattttaagtagaatgataaggaagagcctgtctagagagctatttgaacagtgacctgactgaagggacaacagaaagcagtgctgacattacaggtagcaggatgactgccaagacagaaacgcatttcatatgtgtttgaggaacaaacagcaaggtgaccagcatggggagagtgaagaatgagggaaaccttgaatgagaataaagcaattccatcttggatgctaatctgccatattctgattaatcccagttccaacaattcatctacgatttctattttatctttttaaaaaaattattttttattttttattttttgagaccgagtctcactctgtctcccaggttggacttcagtggcacaatctcagctcactgcaaacttcacctcctgggctcaagcgattctcctgcctcagcttcccgagtaactgggattacaggcgcctgccaccacgcctggctaatttttgtatttttagtagagacgaggtgttaccatgttggccaggctggtctggaactcctgacctcaggtgatccgcccaccttggcctcccaaagagctgggattgcaggcgtgagccaccgtgtctggccatacacatccctgctgaagcccgcattacccttcccctatgctatagaagccctgggtcgggggggtgggggtgatggcacagggatccaccatcttatcttggtgccatccctgacttgccttctgttcataaacgcctattaaatgtttctttctgagaaactggatttgtcagcctctttctttggtatctcaggttccttggcctttgcgggtaggtttatatagacctgctcagcacaggacaggcagtttctcaaaaaattaaaaatagaattaccaaatgatccggcaatatcacttctgggtatatagccaaaataattgaaagcaaggtctcatagaaatatgtgtacactgatatttatagcagtggtattcacactcgtcaaaagatggatgcagcctagttgtccataggcagatgaattgataaaatgtggtatatacatacaataaaatgttcttcagccttaaaaaggaaggaaattctaacacatgctacaacatggatgaacattgaggacattacgctaagtgaaataagccagttagaaaaagacaaatacggtgttccttcacttatgtgaagcgtccagactgagtaagcaaactaatagaaacagaaggtagaacgggggttgccagggacatggggaagggagaaaatgggaagttgcttagtggatatagagttttggttttgtcagatgaaaaagttccagagattggttgcatggcaatgtgaatatacattacccaacccaagggctctccttgacccctgttccaactgccacttagaagtggttaaggtagtaaattttatgtatattttaccacaattcaaaatagaattattattttttcattataattttttgagatccctcactctattgcccaggctggagtgcaatggcgccgtctcggctcactgcaacctctgccttctgggttcaagtgattctcctgcctcagcctcccaagtagctggaacttacaggcacatgccaccatgcccaactaatttttgtatgtttagtagagacggggtttcaccatgttcgccaggctggtcttgaactcctgacttcaggtgatccgcctgccttggcctcccaaagttctgggattacaggtgtgagccaccatgcccggctgtcaaaataggtgttttgttgttgttttttttttttgagatggaggtttgcttttgttggccaggctggagtgcaatggcaggatctcggctcacggcaacctccacctcccgtgttcaagcaattctactgcctcagcctcctgagtagctgggattacaggcatgcaccaccatgcccagttaattttgtattttattttagtagagatggggtttctccatgttggtcaggctggtctccaactcctgacctcaggtgatccacccaccttggcctcccaaagtgctgggattacaggtgtgagccattgcgcctggccttttttttttttttgtgatggacttttgctcttgttatccaggctggagtgcaatggcacgatctcagctcactgcagcctctcctcccgggttcaagcaattctctttcctcagcctcctgagtagctgggattacaggcatgcaccaccatgcctggctaattttgtatttttggtaggtatggggtttctccatgttgatcaagctggttttgaactcctgacctcaggtgatccacccacatcggcatcccaaagtgctaggattagaggcatgagccactgcgcctggcctgaaaaaaaattttaacgtttgagaaaatacaaaattttcatagtctccaagtatttctcctaagatctttccccctatgagggggaaagatagtatctttacaatggagaaacccagcagaaacctgaaccaaatgaacaagttcaacatcatcagtaagaagaactatcaatgccataactctgatggaatgcactgggaaggattccacatcatttttgtgctgtaattgccaaaagttcgtaacttcagtccaatcatggaaatacatcagacaatcccaaatcgaggaacatttcataaatactgatcagtactggttcaagatgtcacggttatgaaagataaggaaagattgaggaactgttattgcagtcctacaaaacggcgagagactaagaaataactaaatgcagcgtgatcctgggtggaatttgggaacagaaaaaggacattagtggaaaaagtggtgaaactccaataaggtcttttgtttagcgaatatgttcattttaaatcagttaaattatttaaatatatttaaacattagttaaatgtatttaattaaattaataaaattggttattttgtgaaataattttaatatagttaaatatgagaatgtggatttcctggttctgatcaccgtactgtggctatctaagaggtgcatgttcagggaggctgggggaggaataaatggacattatactattaagttggaagagagaaacctaccccatcagtcacaaaaccctcacattcatggcagtgtgtcggacgttccagtatgaatggcatttcccagatgtcagcgcgaggtccctgtggagggagtggggctccctgggaatctagtggagagcattcggggctcccttcctcaggagcctgcccttcctgcacagaagcgtcagcctcacctctgtaccactgcccctctgcctctcagaacctactcggcttcaggaagattctactgccagcctcctttcccagatacagcctccagggactcagccctgccttcccaagtgttcccgcctctcttgggaaggcgtgctctcagatcccacacccctggacttccccgggcaccacctgctccttcttcatttctccagctctgcgttctcactctgagggtcctctcctgctgggaatgtgtgttgctggcaacagtgaagattcccccctgggttgccccccatgccctgttcttctgcacttccctggcttcctgcgttggttctgctggtgtctcctgcttttgggtttacgtggcttcccagcttcctaatttctctgaagttgagtttgatgtgtgtattgatgatgggctttttcctcctcctcctcctcctcctcctcctcctcttcctcctcagtcttgttgttgccccatatagtttccagaaggagaaaagggacactgtaaaattaagctgctgcaggctgggcagtggctcatgcctgtaatcccagccctttgggaggccgaggcaggtggatcacctgaggtcaggagttcaagaccagcctgttcaacatggtgaaacctcatctgtaccaaaaatacaaaaattagcaaggcatggtggcatgtgccggtaatcccagctactcgggaggctgaggcaggaggatctcttgaacgcgggaggcagaagttgcagtgagccgagatcatgctactgcacttcagcctgggtaacaagagcaaaactccatctcaaaataataataataataataataataataataataataataataatgccatgtttctatcagacccagaaatcccgcagagtgagctggaattctctgtttctctgtttcccctccatacccactggctcctctctgcccactccctcttggactgcatcaccagggtgcctcactgtctggccctagtggaattcacacagtggaggacgtcataggaggtgggagagagagagagaggagaggtggttattcgctcagattcttccttgttggtttggcagtggccacatctttctactgatggctgcagctcctgatgatcctcctctacagccacagctctctttgggatctgtggacacctttcctgtccctctagacccagggagataacagctcccactcttgctggtccaggacattcctcatctcttattggttcccttaactcggtccacacttctgtgaacagcccctttcctcaagtacccattcgaatatgtcctctggcttccaccaggagcctgactgatacccacaggtgggtgaatgctggcgtgctgctgggcccctcttcctctggtgactggccagccaagtctccaggagtctcgttagggtgggcaggcggtgggcacagcacaaactgtgagctcaaatccacagaacaaaagtgggagaagacactggcaggatggaccgccacaaaactcttggcattcgtgacgtctgtcctttaaatcacgcaaggcatcatcatgcttcagacatgagacagcctaagtatttaagtgtttcaaataaacaaattgtttttcagaattggtaattgctaagttggcaaattgctattggaaacgttggctgtccttgactcagtgattcagccagctagtcccttgccaaactagtatgttgggcaaattccaccttgagaatttatctgctcctgtcaaagccagattctccctgcctgaggggaggctggacttgaccttctgactcaggatatgctgacttgggtccctaggtccaagggcggccctcttgggcccactgtgggctggacctcttccatgatggggtggtggagggcaggccccacctgattcacacttgacctcatccaggcaggtgaagttccctgcaggagtcacctgagcccagcccctcagaccaggatccatcatgtttaggaggatttggggctatctcatgttctttggctagaaaggggtcccactcttaggggtctgccctctgtggggcacagatggcttgctggggcccatggacggggctgggtgaatgggaatctggtcacagcagcagcagctggaaggccaagagggagggcaccagggcctgggacccatgtcttgtcctgggcctccccgggcctcttgccttctccccagcaggcatttgggatctgtgtctggacccagcctcgcccagaaggccatggtgtgttgtcattagaatcacagtgctcacaccaaggcagtgcattaaattagcagggcagggtctcatgggcaggggaccatgtggagggggtggggggaagggcagttgtccccagaggccatggtgggcctggctctgggctgggcagtgggccagggtcctgctgtgtggatgagctctgacaacaggctgtctgggtctggtgagctcctgaaagcggggactggtggagagtaccctagggtgggagctcatgaggagggggtctgtggggtctggaagccattctagagcaggcagatgacatttatcaggggagcaggcatagaaaggacccttgtgtgagtggggggacacacagcctcagaagaaacagggaaggggctttgacaggtccagggagaatccctgaggtttcctagaacaattcccaccagccatgtcccaggtgtcaccccatcccccaggcctctgcagtgccagcccaatgccctgggcaaagcatcctggactctggctgttacaaaaggaggacagggtcatctggacccgcctgagctccaggcccccgactttcacagccccttctgggtccagaagttcatacgtatataaatgaaaaatgtgcaagaatcatattattgtattctttttcataaagaggcccctctaaattgttgaagccccgattcacccctgcccaaaggagacagcaatggcatgtgtggggccacagtcttgagacccagaggtcctgctgcccacgatacccactgtccaccctagggggactggccgtagccctggagcccgcaaacaccatgcaggaatgcaagagggtctcagctcccgagtcccaggctgggagggcccacagtccagtaaactaatcaggccccgacacatccaggagagcagctccaggagcctgcattggggagagagcctcagacccctgccacaggcctgcaccccagaagtaggagcatgggaagacctctccttggctcctggccagcagaagtcacattccccagccctctggctccaaggcagcctcacgtcccagtcactccttggcacaccctaccagttggtcagagctcactgccaaagggcacctcaatgatgagtggagggaacaggtgtttaccaggagcttgcatgctttgcctcagggatgattagggacacagccaagaaggcacgctatgcccattttacagatgaggaaacggaggctcaggttgggctggtgactaagggaagcagcatgtggcaggtggcttgaggcatgtctgtccatcatgagtaactagggagcagccctgccactcctcatgcgatgcaccaggagccagggaagctgcttcctaggggattctagctaaggccagaagcatctccctgagtggtggtggaggcctctgtctactcctccaggactgccaggggataggagggcactgctgacctcacagagcctcttgggtgagtgagcatcagctgagcgacaccaggtgactacgcttctgcccagtgctgtgcccccctctgactcgggcaaggcaccaccctgaacgccccaccctgtcccatggaggccgcaaactgctctgcagagccagggtctccaggaatggggagggcagtcaccctcattccacttgtgttcatgactcaaaggactgcccaggtctccaggcccatagaacccccaaacctcttactaggccacactggggaccttgagcagcaggcttggaatcctaggccttgtctccaggtacatatcagtacccaggcttgggaagctttggtctcaggggggctggcactcaggccctctgcctcaaggaagaagcatgtccagatctctactgtccagccctgctccctgcccctatccttcacggggtccctaggacagggttacagaagcctcatgctgtcaggggatgctgccaccctagttccagggtggctccgcccagccccttcctgctgccgccctcactgactcacctgtccagcctcctactgggctggggtgagggcttattgccccagagcctagataggcaccagaggcagctataaaagcatgttgggccagtcctcagcatcctagttcgccactgtctgctgccacacgatgctgggaggcctggggaagctggctgccgagggcctggcccaccgcaccgagaaggccaccgagggagccagtgaggacccagggctcctttctacctgggctggggggatctggggcagactgggtctgtgggaggcggatctacgtaggcaggcgaggacctgcggggaggccttggcccctcaggaaccctggtctcctgctctaccaagtcagcacggagttgaggggtgcagacctggggaggtctcctgggggcagggcatgagtcctggtgctgggtgaacactggcagcttggacccttccctctggaaatctggggagcctttcttgtcaaaacagcctattctgaataacctatgcaggaaaaggaagatggatttttatttttaccataactttaaagcttcaaagatttcttaacaagtcaccaagtctgttcaaagtcaaaaagggcattttcaatttcatccaagtcccctaaagcatgtttatttttatttgtatttgtatttgaaatggagtcttgctctggcacccaggctggagtgtagtggtgcgatctcggctcactgtaacctttgcctcctgggttcaaagtgattctcatgcctcagcctcctgagtagctgggattacaggcacccaccaccacgcccgactaatttttgtatttttagcagagacggggtttcgccattttggccaggctggtctcaaactcctgacctcaagtgatccattcctcttggcctcccaaagtgctgggattacaggcgtgaaccactgcacctggtcccgaagtgtatgttgtattcagaggtcagcaggtatgtgtggggaggcccagccaggccccactcatgggtcatcgtgtgaaaaagtcttgcctgagtttgtgtcctctttctaaatggcagcagatgcgtattttgtttttgactctgcagctggtgtggaccacctgctttaacctttcactagcctctgagttttttatgattcctgttgggagaaaagctcagcgttgggagaaaagctgaggcagggcttgctagacttgctggctccttgcttctagcactgccattctctcaagtagccatatgtttctcattcacttgatacactgtttcctttcaacctccacatcctcaccacctgtttctttgttagatcaccaataaatagcgtgggctcccagaactcggggccttcgcagcctccacactcgcgatagcgccctgctcccattttctctctcgaactgtctctttgtcattcctttgactccgctggacttgccgcccccgtgacctggtgttgggtctcatcatcccaacagattcccattctaaagatgagggaaccaagaggtggaaggtagagttagaataagaaccatttcttctgactctgaaatccttcagttctagcacgctaccacccacactttaaaaaactctgaagtaggcagagaattccgttttgttggaggaattgctttgagagacctggtcttagtggatgaggctttggaaaccaacctgaggcaggcgctagcacatcctgagaggggtgtgacctggcacacaggcccagcctgggcttcatgtctcagctggcaagactgcctgctcattgccattccaggccgggcagggccaaggggcttcagggacccatgccctcatggggctcattgagctcgtctcccagcagccaaggccctggcgtctccaaatgaagccagctgtgggggaaggtccttctcatgagtcagtctgtcctggctgggggtggcaccccagagccccatctaggatgcccagggatgtataggtctgttgtgaggataagccagccctgagccctcaccctggactgggagggcagtgggcctgctctgagccctcaccctggactgggagggcagcggctctgctctgaaccctcaccctggactcgggggcagccggcctgctctgagccctcaccctggacttgtctcctctgttcagttcatgccgtggaggaagtggtgaaggaggtggtgggacatgccaaggagactggagagaaaggtacagccggctgaggtcgggcagggaaggagggagggaggaagggaagctaggtgctgggccaacctgttctttgactaaccaggtcaaactctgcccctaatgttgcagcctttcagagcctcttggctggggcagttatctatgctcatcagaggccacagactgtactgcgttaggacactgtctagatggttctctctgtggaataagaagacaaagtcacacaagactatgtgacagcacactgggacaaaacatttaacatggcagggtgcggtggctcatgcctgtaatcccagcactttgggaggctgaggagggcggatcatgaggtcaggagatcgagaccatcctggctaacacggtgaaaccccgtctctactaaaaatacataaaaattagccgggcatggtggtgggtgcctatagtcccagctacttgggaggctgaggcaggagaatggtgtgtacctgggaggcagagcttgcagtgagcctagatcatgccactgcactccagcctgggctacagagcaagactcggtctcaaaaaaaaagaaaaaaataattgctgggggcggtggctcacgcctgtaatcccagcactttgggaggctgaggtgggcggatcatgaggtcaggagatccagaccacggtgaaaccgcatctctactaaaaatacaaaaaattagctgggcacggtggcgggcacctgtagtcctagctactcgggaggctgaggcaggagaatggcgtgaacctggaaggtggagcttgcagtgagccgagatcgcgacactgcactccagcctgggcgacagtgtgatactctgtctcaaaaaaaaaaaaaaaaaaaaaaaaaaaaaaaatttaacatgtaaaattctatgttaaatgttaaattgatgtgtgtgagctatgagtagtactatgtacaaagcatgtgtatatctcattccttttcaacaaaatagattccaggtagatgaaggacttacatttacataaatgaatttattaacttactaggagataaacatcttagctcaggctgctcttataaaataccataggccaggtgcagtggctcacgcctgtaatcctagcccttcgggaagccaaggcgggtgggccacctgaggtcaggagttcgagaccagcctgaccaatatggtaaaaccccattgctactaaaaatacaaagaccagctgggcatggtggcacatgcctgtaatcccagctactcaggagtctgaggcaggagactcccttgaacctgggaggcggaggttgcagtgagctgagattgcaccactgcactccagcctgggtgacagagcaagactctgtctcaaaaacaaaaacaaaccataaactgggtgacttagaaacaacagaaatttatttctcacactcctggaggatgggaagtccaagatcaaggaaggcactggcacatttggcatctggtgagggagtctttctggttcatggatgggcccagctctgtcctcacatggtggaaggagctagctctccgtggtctcttttatgtgggtgctaatttcaacctcccaaaggccccaccccttaatatcattacattaagactgaggatttcagcatatgagttttgagggggaagacatcgtaaacatttagacatagtaataacatcagagactttggcctaatcttggagaggggagaatctttagaactatgacaaaaaaatcagcgccataaaggaaatattaagtaaatttgacaatccaaaactgaaattttctatagccaaaaaaaaaaacactataaaccaagccaaaagaaaaattatacactgatgaaaaatatttgtcataaaaatgataatccaatataacaacccaatataaaaatggtcaaaagacataagcaggcattttccagaaaaaaggataagcaggcaatgtacccatgagtagatgctcagtctcactcacagttgaagaaatgcaagttgttggggaaattaaaaccaaattcaaattcattctgcagtaatcctgctgcccttggtcccatcgggccactccagagactaatccattaagatggccacatcccacaggccactcaaggggacacaagttcagcaggtggatcactaggacattcttcctctttccaacagccattgctgaagccataaagaaagcccaggagtcaggggacaaaaagatgaaggaaatcaccgagacagtgaccaacacagtcacaaatgccatcacccatgcagcagaaagtctggacaaacttggacagtgagtgcacctgctaccacggcccttccccagtctcaataaaaagccatgacatgtgtacattgagcgctggatttattcccatttggatggaaacactaggcaaagtattttcttgttgacataacatattttacatatttatggtgtacacttaagtatttattacatgcacagaatagtgatcaatcagggtgtttggggtgtctatcaccttgaatatttggtattactatgtgttgggtacatttcaagtcccttcttctagctactttgtttttttgtttttgtttttgtttttgttttgagatagagtcttgctctgtcgcccaggctggagggcaatggtgtgatctcggctcactgcaacctctgcctcccaggttcaagcaattctcctgcctcagcctcccaagtagcttggactacaagcgcaggccaccatctctggctaatttttattattattattttttattgtttttatttttagtagagatggggtttcaccatgttagccaggctggtctcaaactcctgacctcaggtgatctgcctgcctgggcctcccaaaatgctgggattataggcatgggatactgtacctagccttctagctactttgaaatatacaatacattgctgctaactatagtcaccctaggtgaagtatttttcaacagaaacactttgcatgtcccccgtgtctcctctgctgaggtggacactggcactggggcccctgctgctggttggataggtcctcatgatgaaacagatgcttctctgtcatgctaagtaagatctttcatgtcaggaaggggctcttctggaagaatagttagtgtctgtgcttcatttcctaaaaaactgtttcaccagaaactatatacaactttcaggtgcctcagtgcttcaagacatgctaagggaggaccctcatttgtcttgcatgtttttgggatttttcttgagatgttcttgcaggactcagggcagataacagaccagcttgatgaagaatttagcaaggaaggcccccactgagctgcttcctgttctcgcagagatcagataagcatttctgctggacggttacagaatctggtcaaggagagactgagtcactgctcatcatcctagaagctgctgttgattttttttttttttaaagacggagtttcactctgttgcccaggcaggagtgcagtggcatgttcttggctcactgtaacctctgcctcctgggttcaaacaattctcctgcctcagcctccccagtagctgggactacaggtgcccgccaccactcctggctaattttttgtatttttagtagagacggggtttcaccatgttagccaggatggtctcgatctcctgacctcatgatccacctgtcttggcctcccaaagtgctgggattacaggcgtgagccaccgcacctggcccagaatatttatttagagactgatgtcaggcctaagtgttgatagtgggtagtagtgggcaagatgcctggccctctctccttctcatgagcaagtcagtatcatagaggttaaacatatctttaagtagcatttaacttaacattttttaattaaaaaaaagagaagtaatttgtaaaaatattgcatcccctatttctcttgctggaagctatttgttcttagcagaaatgagaaaaaaaggtgttttgcttaaaaaataagtgagttgctcaccatacttctggatctcatctagaattggactcacagtttgtgaacagcccaggtatagccaatgtcttagctttggaacgcttgccactttccagctacagctgaaccttatatcctggtttggttcctgatgactttcaaattctcctgacccaaacgcaagctcagaagcacaagcacattgttggtggcagtacagactgaaacaccctctttggatggcagttcctctcacaggactttattctccaggtatgcacaggcacacacaggtgcccaaaggataaacacacagatctattgtagcatatttgtattactgagagattagaaacatcctaaaatgttaaccaaatcgcttggatgaaaagttttgctctgcttattaggtttggcgtacaatatggaggtgacatctgttacttccagtgtattatagatactttagctccaaaaatgatacctgtacctagatgggcaccaaaagggaatggttaacaaatattgcatatacaggggtatggggcagctccggggctggggatggcggcggccaggtttgcagcggctccaggatgagcgggtggatcccgggaagcgtggtgaaatgggctggctcccgagccagccgggaggacgcttactacagctgctcagaagcaccactggaagctcagatgtaggtgccccagccagaagcagagaggggttcagagaagctacagagaagcccctcctgatgccccagggagcaagccaactccttccaggctccaggaacaccacaaagcaatatgaaacctgttcatgagaggaaccaggaatgccttccaccaaagaaacgagacctccccatgaccagctgctccactaaccacacatcctccagtgatgcctctgaatggtcccgaggggttgtggtggccgggcagagccaggcaggagccagagtcagcctggggggtgatggagctgaggccatcaccggtctgacagtggaccagtatggcatgctgtataaggtggctgtgccgcctgccaccttctcaccaactggcctcccatctgtggtgaatatgagccccttgcccccggaaaaaaaaaataatattgcatatgcagttgattaaatggcatactccatggctattaggagtgatgaaaatgggctgggtgcggtggctcatgcctgtaatcccagcactttggtaggccaaggtgggcagatcacctgaggtcgggagtttgagaccagcctaatcaacatggagctgtgtttactgagtggggctttcgcaggctggagctaagaatttccagtatgcgtaacagccacagcccaaatatctgccagtgagttgtgtaattccccagagcaggcctgggcagtgtctgggtggggcctgggagccacaggagatgcccaaagccaggcagagcccgggggcgaggggacggcaggcaggtgtggcgctgccctgggcgggcttgcacccccacacccaagtgagcggcctgctcactcctcagctgcaggagccagacgtgtggagtcccagcagaggccaacctgtgtctcttcatctccctgggaaaggtgcccccgaggtgaaagagatggcctggtggaaatcctgggtaagtgggagctggcaggagatttgggttcctgcatggtgttgggtgctggtcaccagggagtcctgagaaatgtaaagtcgcccttggctgggagtggctcagtctacatttggctgcctcctgggccaagcatggagggtgggaaggggccgagaagaaacagtcccaggcctagagtgcccacggcagggatgggacctgggccgggagacaggctgatgaagaaatctagaaatgcaagggggaagctgaggtttgagaagagtccaggggagggacccttgcaggggtggggccactcaaaggagggggtatcatggttgagccttgtgtgtaaatgtgtatggggtgcacacacgtgtgcatttggggagaatcaggcatactgctcctggcagagggaactgtgtgcagagggtcagagggcagggagcttggcttcgagggaagctgctcagcacagctcaagggtcctggtaccggaggagatggacctggggaagcaggcagggccaggtcctgaaaggccttgcctggcaggctgaggagttaggctttaccttaagagaagtgggaaggcactgaagggctttgagcatgagagtaacctgaacctgctgttggggacccatcaatgccttcacctcagggatcaatgatgttcatttgtcaagactggagagggaagaggggaagcaggaggacctggcctgctagagcctggaggaacccggggctcagggcagcccatccccagcagaactgatgggttctcgggagctttccatctatggttgagcctgaggccatcgctgtgctaaggagttgaatatccagaaggggacagaggtgacatctcccggctgccggctctgcacacccttttcctttcctcccaggcagcctcaggatgtcagggctgcactttctgttttgcagatgatgaaatgaaggctcagagacactgagtgacttgctagggtccaatggccagcaggctccagtcagagagcagttgggtctctctgcccagccccaggttctctgtgagcttttgtgggatacccaggcttgtccagcttcagggagtctctggatcatagatgtcgcaacccaagcaagtgtcctcagggtcagacatgctaggttctggacaggtgggacaaagaggaagccaggctgaggtggggcagctgtcctggcccccagggaagcagccttcttccaggacaaggggccatggaggcctgcagcttcaaccagactgctgggaacctgcctttgaggaggtggacatggcagggagagcccagtgctgggtggtttccaaagtcagttgctggccaaggcagtctggcactgggccttgcacccagtgcagcaggacaaagggctgtccatgtagggacctgccaaattgacaggatcactgtgacactcactgagtccctactctgtggccggacccttctctaagcacctcacattcaatatctcccttgaacctcacaaggagtctatgaagtagacaccagtatccttatccacagatgaggaaactgaggcacaagtaggctaggcaggtgcccgaactcactagtaagtgtgagagtctaggtgagaatctgaacagcctgactccagggccaaaaccataccctggtcgtccataccccatgtgagagctggctaggggtagcaagttcacaggtagaccccacctgcaacagctgagctgctagcgaagacccagtgtcctctaggcacaaagctgggccaggaacgcgatgggaggagatgagggagccactggagagagatctgtctgcaggcagggtccatctgcacctctctttttggtgttgccttttcctctgtgtctctcatagagacaaacccatctcccaggcctctgggcagccacgtagcaggggaaggccaaggcgtggcagctcccctgtgcctgtcacagaacaagttatattaatagatgtagtcacaggctggtctgagtcaccttttcagtgaaaatgtgcctgtctggactagcacggccctgggcaagaccctgcaggagcctgaggctgacccttccttctcagcaggaggtctggagctccaggactccacactgatagccagggctccgattcccagaacacttattttctaaaaccttagagtgggaagtgagacagaggcttctcaatgcagcaaaatcagaaccagccagggagctgcttacaaatgctgcacctgagacctaccgcacccctgcgggactgcatgctcctcagggatgcggttacacagcctggccactcgctggtgcaccacagcccccgagtgctggggcagagggaagccggcaggcactgagagctgagatgcctcccacattcccagatgacctgcgttcctgtgggtgaagcttccttcagtggaacgttccaggaacactcattgtctgggaaaggtggagtcatcagtagggcaggggaggtagatagagctcagcttctgagtcaggctggggagtcccaacagcatcacttactagctgtgtaagggagtccagctccctttctgtaaagtgaggcatcagtacttacctagcacaactgttgaggaagccatgacataagcattgcttctaaagcacctggcccaggtctggcacacacaaggggcttgaagtgctaacaggagtaatagcagagcgtgactccacaagcaagggatatcgtgtgtgtggacaccgatgagcaatatctgggaccacactggctctctctggatggaatttccataggaattatttctaacaatttctgctgtgaaacatggtgctaagaaatgactcaggaagatctgtcaccagacatttgaaattaaagcaaagagttcagaaagatgccttacctcttactcaaaggaaagatacttacagatataccatccattggaatctctgtattttcacaatctaacccagggcttcgatggatggatggatggatggatggatggatggatggatggatggatgggcgggtgcatagatggatgggtgggtggatggatggatggatgtggtagtcaaatgggtaagtgcgtaggtgggaaagtagatgggcagatgatggaggtgatggaaggaataagtgaacaggtaaatggaagacaagactggatgggactaaactctttttcatcctggaggatctctgagtctccctctaattcaatacctatctccaatatccctccattctctaccattcctccacccaaaacacacttatgtccatgttaatcatctgagaaattctgcagggcacaagtttaaagagccttcaggcaagccctgaactggaggcttggaaatcaagggctcaggcacttggttatctggtttatttcacaatctgcagagcatcgtgcgggtttttctaaacctgacgctctgagccccatgggcctgtggacttgcaaacaccctgaactatcaatatgctcagctgggcccctgccctctaagttgctgtaagtcccaactccccaggaagagggcagactgagctcaaaccattcctcagaaaggcagaaccatgctcagccttccaacctcatctgcacactctgaaggtggtgcatgcagctccaggaagcctttgcttcagtgttctttcccctcctaactttgggtgagtttgtcccttcctgctgctggtgggtgatgctggaaggagctgggtgtggctggggctgctgtctgcagtcagatggcacagacagggacaggaaaggttttgtggcttctccccacaagctctggctctggctactccaccctgttggccaaggggctgaagggcagagcactggcctgcaagggctgagcagatctccgtgcccagggaaggggctcaccctgtcagggcgggctaccagatgggctgggagcctgctctgccctccctgtccctgcctgctttgagcaggcctggttctcttgcagattgaacaggagggtgtcacagtgaagagcagctcccacttcaacccagaccctgatgcagagaccctctacaaagccatgaaggggatcggtgagtgggtgttggcagccttgccacctctgctcaagacccctccgctcacagccctggaaagcgggtgccaggggacatctggggagctggggtgtcccatgatactctgaaactgattccactacccagagaatcacacagccctctgtttctgcagtgaggtcagcacccaccctgcaagactggacaggagggtgctgctcttccctgggtaatgggggtggggaggtgagctgtgtgtctctgtgagtgacttcccatcagtctcagctttctcacttgtaaagtggccccaagaattcttggccttgtgtgtcacatgaagtgtgaagggggtggtgctttatgatgccaggcacagagctgccaggggtgtgaggtgttgggagtttgtggggctgattcaaggcccccttgccccatgtcgatggccatggagccggctcccttcccatctcctgcacttgcccagtgctgccctcagcactaccgtgagtgggcgagggctggcctgaggccagatttaaacagcttgcccagaaagccctcctgacctgagagcagagcatgtaccctgacctcaccccaggtgggactgaccccttagccggctctgcctgaggatcaggggccttaatgagaactgccgctcctgacaagcccagaaaacgttctcatgccctctgctttctgtgaagcagaaagttatctccacttcccaaatgagaaaacggaggcccagggaaatgaggctggctgcccaatgccacgcagttgctgggccaggcctcggattcaggggttggactcttagtcttgaccttcccctactgcgaccaacacaaaggagggcagggccagagatctcactcggccaagctccaaaggcccgggctgatgtccagagccacccagacctcagattccatcttgtgaggctggccttgggcacgccccaacattgtgggggtgtggggtgggaaatggggaggcagatttcctaagggtcttgtttacaccacgaaaatggtctgggggtttggaactatccaggtgtcgggtcccaactgctcagccaccaagcagctgccttcgccttcccctcctccgccctcaccagtgtgtcaccctgggggcagcagggtcacttgtgctgtaaccctgcagggaccaacgagcaggctatcatcgatgtgctcaccaagagaagcaacacgcagcggcagcagatcgccaagtccttcaaggctcagttcggcaaggcaaggggaaggctggtgggggtggggataggtgagccttggggttgggggtacagcctgggaggcagctccattctggacgactttcccctagagccagcccactggcagcatgggcacatggaacatgtttgcatgaaaacaattgttctttattgaaattcaaatgtaactggctgccctgtgttttatctggcagatctacttttaggtgtcagagcccgggccgggggctggccttccttgcttcctttcctgcctcctctctcacagcattccttctcatgcacccaacaggccccactggaggtctgtctccctgcccccaggctatctcgccctgccctctgagcccagaccaccttctcttttccatgccccaggcatgcaggcctggctttgctctgttctggggcgtgggcatgctttcctcagtcgagctgcttgcacccacacctcgtcccttctgccacctgggaattctaagagcctggagtaagcatgccaggccctttgtttctcctcccacctgcactccacccctaggacaaagcctgacatttgggggtacacagtaaacacaggattaaatatgtgcacagccatggttgcctcaagcctctagtgactcatatcattagtttggagatgtaacgaaggaagatcagctcaaatattctcttggagaacccagtatgcatttttacagtttccctctcttagtcctcacagtgatacattctttgtattcaaacatttggggaaactggcactcagagaggttttaagttgcccaaggtcccagagcctgtaatcaacaaggtggggattaaaatccaggtctgacaaagcccttgatctctctgctgctctgtagatcagctgatgtagcctggtggctcctcgtagcaacatgtgaccttagaaggaggcacatgtgagacgaagtctttaattcaggcatgcattcattcattgagtgccaagtgacaggtattttatggtgatgccatactcagagcttgcagtctagctagcaataccaatttcattttactgagagcttatgatgtgcccagcactgcactgaatgctgaattgagtcacacacaaccccctaagcaacgggatgaagcaggagcacgtttctctccgtgtaaccggtaaagatactgatgctaagagaagctaaggagctggcccaagaaacccagccagcacgtggcaaggcccacgcagaatccagcccaagcccctggacccagccaccactccgctgcctgcactcaggtgggcctggcttatgacaaatatcacctttccctgttcccgcattaggacctcactgagaccttgaagtctgagctcagtggcaagtttgagaggctcattgtggcccttatgtacccgccatacagatacgaagccaaggagctgcatgacgccatgaaggtaaccaggcagacagggcaggggagtggcaggggtgctcacatgactgggtaggggcaatgcggggaccgggaacctacagcccagagctccccttgagccactgtttggaatggccatatgggccataactgggcccagtgagcaggcagcctgctgctcagactgcacccaacacctggagtcactggtgcctgattgacacgttgagtggccgtgatgaagccaaaatcagtacttctcagaacctcacgagctcaggtgtacagtggtattggaaacccacctctacagtcccaggcacagccccttgggtttccctttacctctcactactctttgcttttgcagattaataaggatggggacccagtaactatagtcattttgtttggaaagacacttgctgcatgggcactgccaggcattttacacccacgctccctaatctatctttggcgcaggggaggcttcttattcctgtttatggatcgggatgcttaggctccaggacatggagcagcctgtctgagaccacccagctaaggagggagagctgagacagggcttccccgtcacagcacttgccctcaatgttcatcactgaagcatgtgattttctcatcacatcctcccacttcaagtggggcagggcagtgaggtccttcctgaggctcaggcatcttgagaaaagaaggtgtggacagagcagaaggtcatggcagagcactccagcaggcagaggtttctgtccacagggcttaggaaccaaggagggtgtcatcattgagatcctggcctctcggaccaagaaccagctgcgggagataatgaaggcgtatgaggaaggtaaggggtggcacagatggaggggctcaggagtggccacaagctttggcagcctggcagggaacaaggatcaagaattaacctgggccacactagaaaggaccctttggggacttttttacccacaggtgctgagcacctaccgtatgccaagatctgtgcctgatggtgacactgaacatgattcagacttgatctgtaagctcaccagctcctcttacaggggagagaggcctgtgaccaactaaaatctctgcccttgaggactgtggtagtagggggtgtggaccccaggctagcagaggccagtcagtcctccacatcatgtacctagtggggagttttcctggaggctttggctttgccaagccttgagatgaaatggagcttggttggcagcccctagcctggctctctgacctggtccatcttgtgctttgagcttggttgggtacgcatgtcgcttctagttgtgaagcaccacccaggcgacagccacttggacacccgggcattgcatccatgccctgtgccaaggactttctttcctagaaggctttaataaggagaagtatggggaacagggctggaaggaggaaagcaggccccgggtaggctgtgggcctctgcttgtgcctcatggtcctgtttccctgcagactatgggtccagcctggaggaggacatccaagcagacacaagtggctacctggagaggatcctggtgtgcctcctgcaggtgtcacagcctaggctcttgggagtgccttggtttgggagtcccaacagctccaccccagggagcagcccttgaatagcgccacaagagtcagggtaggggcatgggatagcccagcagccagggctcattgggtgtgtctcagcatggttagagggtcccaactgcagagcccccacacctgtccttactcagccatgtgagagcatcctggaagcgggaggagagcaggtccttcgtgcaggcctcatgccaggcactttgcttaccttagctcactgaatccgccaagccttatgaggcagtccttaccacccccattgtacaaatgaggaaaccaagggctgaagagaataactggcttgtcgaagtttccacagccaaagagcagcagagccatgcctgccctccaagcccaggatcccccctgtgcccttaatgctctggtcagctggcctgccttacagagccacctcctctgttcctagggcagcagggatgatgtgagcagctttgtggacccaggactggccctccaagacgcacaggtgaggctgcgcccagccggccatgtggccccaccccctgccatctggactccggctcctctgcccacgggggctttctctgacactgggctgggacccacccagctcagctccctataggcctttgtcctgtggtgtctggggaggagagtgagggtgttgggagactcgggaggaaggagtgtgacttgggggtgggggagcactaaagctctgtcctggcaggaacagcccatgaacccgggggcgctaggccccagtgctggacacaggtgtccgggtctctgtaggtctgcctgctggcagagggaagtctggggaccaggcagttcctagagcagcttgtggcccaggatagagaaaatattctaagccagagctgctagagaaaggggagctccctgtcagagacgaccaagcaggggagcatgctggcctggcagagtggacagggccaggccatggccacagctctgggactctggggctcagtccctcacctccctggtctccctcactggcttattgtgggtgtcccaatgctaggatctgtatgcggcaggcgagaagattcgtgggactgatgagatgaaattcatcaccatcctgtgcacgcgcagtgccactcacctgctgagaggtaccagggagggaggggctggggccggggccacagggggtgtcctggccatgagcctctccctcgtgcttctgccttgtcaagtctagagttagggagagagccagggagcccaggactgtttccccagccaccagtgggaggtcagggcggcaaattgatgtgcgatctctgatccgagacactgaggggcatcacgaggaggtctgaccatcccctgagcagagccctctccacagtgtttgaagagtatgagaaaattgccaacaagagcattgaggacagcatcaagagtgagacccatggctcactggaggaggccatgctcactgtgggtaagagctcagacttgcacgtttttcaggccacagggctcaccgtggggcagcaccaaagaacaaagggcctagggatgcgaccacaagagaaagaatccctgtgtcaccttcacgggatgtccccccgactcacactctgcctgtctccctcacccagggactgctccacctctagagtcccagtgtgtgctgccaaagattgttctctgtgctgcccacgtggtgcccagtgctgtgtgggtgtgtctgcatgagtgtgtgtgtgcgtgagagtgtgtgtgcctgagggtgtgtgtgcatgactgtgggtggaatgtgagtgtgtgtgtgtgagacagacagtgtgtgtgtgtgcgcacacaaatgcatacgccagtgattatgccagccccaaccctgtgtgtactcatggcagccatgcagggagcactctggctgtggttgtgaagccctggccagcacaaagtcatctttctggacatgaaccaggggcctggcccctgccttcattgccagttgaagaaacagtgatgtgtggcttgagtccaaactgagtgacggatggtctgatgctgagaaacactggggatcttccccacagcaggaagtcagggccactcaggaggacccactccagagctctcatgggttccagggctgagatcacaatgggaagagtcactgcagagtaaagagctgaggcccagggcagagggacgtctcttctcccacttacacacagagcccaggtccggactcctggcctgcagctctcacctccacaccaggctgcctccgtgcaaagccagcagccagcaggctccctgctgtttcctagcctctctgggtggacagggccatctgagacaccccagctggccttggatgctgtgatacaatccggtctatgtcaggacatctaatcacacccctgctccaatctcagcttccacccctggatctggcctgaacccaccaagaatgaagtctgccagcagggaatagtgaagccatgcagtgctccgtcatgctgggccttcctattcacttcaccttgaagcctcgcatcagtctcacttcccagatgagtcagggaggttgagtaatgaagccatactgcaccatcaaggcaggaagtgaacacatgcctacctcactcaaagcccatgctccttctgcagccctaagtgaaaatgccaaccttccccacccagatgccaagtctctgagcagtacccatgggagcaagcatgggcccagtctctggaccagacgcccccaggtgccttagtcctgtggggccaaactccacttgtcacatgggaattcaaaatgcagggttcctgctgataagtgtgagagagagggcactctgaggccagcagccaccatcccatggtgcttctgtggagctgagaggctggatttttggtggaggtgtctctgggttgagagcccagggcctgtcctgagtctgagctgcccttggatgggcttgagctggtgtcttcagacgagccccacagtctggtgcatttcacatcttacccttttgcctgcctgcttgggcctttggagctgtgcccagtgccccgggctaccttccctgtcccacgccacctgacacaaagcctctcacattgggaaaggcacggaacaaagaaatatgccaagccttgcacaacactgactcttaagacctaaggcaagacataaagttgtaggcagtgccacctaccagctccagacattaacacagctttcttgtttgccagtgaaatgcacccaaaacctccacagctactttgcagagagactctactatgccatgaaggtaactgtcctgtcttcttcttcctgacgctcaccctacatagcaccaagtgcaaagccaaggagctcaaagccaccacgatcctccacacgggggagttatcttacccaaacctgtcgtggatcagaaaggttttagttctcggaggtgaaattgagtctgggaaagggacgctgcatctccagaggtgaataattccctgaaactaaaaccattgcccgttttctctgattgatggttgctgatatcccctgaagttagttccacacccgaaacccaagccctctggccacttctgcccaggaaatgagagagggcatgcgattcccttggccatgtggccccagctgacatgagactggtcagggatgaaggtgagcaggaaggccctgcctgtgaaattcctggctgagctgattgctgccattgctctagtaggaagtcttgttcctggagcagtgagtattttgtgtctagaatctgatgtggcaaaccaaacatactgcagtttggagcacttggcatcataaaggaagagttctgggcagtgggtgagaaggaattaagggagtggacaccctaagccaccaaagcttccctcctaatgcttccctggctgaagcacaggctccttcccacatctccctccctctaaaagccccagaacccaaccacacagatccgtccatcactcagagatggacaggaaaggtgaggcaggattgttgatggctgctgtcttgcccagggagcagggacgcgtgatgggaccctgataagaaacatcgtttcaaggagcgagattgacttaaatcttatcaaatgtcacttcaagaagatgtacggcaagaccctcagcagcatgatcatggtaagcaggcattcccaatgctgaggccagcctgaaacccagacattcagggaaacctggaggctgtggccaacactacgtgagcccctcccttcccagtgggcaccatgtgcttgcattcatgaccatgtggtgtgtgcagggaacagcagaggtcagtgtggctggatcccaaggggaatggggggcagaggggagatgcagagaccagggcacagaggctcccctgtgtcccactcagaaagttggtttcacatttaagttatggttgctccttggaaaagacaccaaatccttgcagaagaagccacctctgaaaagtcaatgagatgaactagtccggtaggaatcgggcccaccgctcaaatccagatttaagtagtcctggcggccaacttctaaggagataagtcagatgagcgccaatagactatctaaccagattccaattagcaaaagttctggagccttcaaaacacagactgattatcacgctgcgataattgggagaaacagctcttctgggggtgtctgcaaattgaggtcttgatgatttcattagcagaagtcacattaggacaaatgtatccccaagttttctttggctactaagtcaagtctctagctcttctgcaaatgtcgttgttaagtgcacttttcaagaaacacatagctgacaataggtggaaaagacatttctgtttccagatgtttcaagatggcaacatcttgaaacaggtgggcaggggcaagagaggattggaattattcttggtttcacttgaggctccccagccaatcttgtcgggagacaggagggcaaggcacacaccagcctggactgtgctgtcacctgcagacagtctgagctgattgtcattaacccttttaaccacacatggtaacttacggcatcagagagatttctacagatacatgaagccaccctcttcaaattttatctaatgttgttacttaagaaaattgagttagaatcatgaatacattgaccaaacgtttctttttagtgtagaccacagatgtcattaaagcaaaaatggttttcaacactaatatgagttaaaaactcctgcattgaaattaagaggcaaatgtataaacactccaagtataactcatgtatttgaaaaagtaaacaaaattaatgcttttctttctaaaaactattcgaaaaattgtcctcaaaataataaaaatcaccaggcgtagtggcccacacccgtaatcccagtgctttgggaggccaacgcgggaggatcgcttgagcccaggagtccaaggctgccgtgagctaggactgcatcactgcactccagcctgggtgacagagtgagatcgtgtctagaaaggaaaaagttaaaaaaaatttcattgtagtttgaaacccgtaatgagatttcaggctcaaaacaggcaaattttactaaatggtgaaaagtagacaataaccatgagacctaaactggtccagagtgtggaaagtgggtctagccccagtctaccccttactcaccatgccgttgtgaatgaattcactcccctctcttggccccgctgtcctcaactgcatgaagaagaatctgggtgatctgacctggcccatttcccagctctgtatgcagaccccggactagccagtcccatcaggacctaccactatctaagaaacagggctcctcagtcatcggaccacaaggtcagtctcatcaggagacaaacactgtggacccgatgtgagccagatgcagggcagaccagctcgccttcctcctgctgtaccctcaccacgtctcagcaagatgcacagcagcacagcattgatctcatttcatagatgagtcccacagaggtgaaggggcttgcctcggccacaccgtcagggtgcgatggtccaggctccctccacccccggccctgcccccaggtgtgtgctgatgcctcactctcagccttgattcccaagctgccacagcaggtgttgaataatgatgcatcctgttgtgtaaatgaatggctgggcaccctggctcccgaatagaagaaccctgggacagctgaccccttccttgtttaggagtggaactgtctctgattcattttccacatcaatcctgcatgtagttggtaagagaatcaaaaggaaatgtaaaggaatagcctgaaattaaaaacaaggaaagaggggtgatggcacaacccctgcggctaggaaccctggagggccgggccaggtgcaggccaggggcacacctcttagtcataataacacagccgccactgccgagccaggcacaagcaaaccccttctcacgcttatgcgcctcctgcccacaggaagacaccagcggtgactacaagaacgccctgctgagcctggtgggcagcgacccctgaggcacagaagaacaagagcaaagaccatgaagccagagtctccaggactcctcactcaacctcggccatggacgcaggttgggtgtgaggggggtcccagcctttcggtcttctatttccctatttccagtgctttccagccgggtttctgacccagagggtggaaccggcctggactcctcttcccaacttcctccaggtcatttcccagtgtgagcacaatgccaaccttagtgtttctccagccagacagatgcctcagcatgaagggcttggggacttgtggatcattccttcctccctgcaggagcttcccaagctggtcacagagtctcctgggcacaggttatacagaccccagccccattcccatctactgaaacagggtctccacaagaggggccagggaatatgggtttttaacaagcgtcttacaaaacacttctctatcatgcagccggagagctggctgggagcccttttgttttagaacacacatccttcagcagctgagaaacgaacacgaatccatcccaaccgagatgccattaacattcatctaaaaatgttaggctctaaatggacgaaaaattctctcgccatcttaataacaaaataaactacaaattcctgacccaaggacactgtgttataagaggcgtgggctcccctggtggctgaccaggtcagctgccctggccttgcacccctctgcatgcagcacagaagggtgtgaccatgccctcagcaccactcttgtccccactgaacggcaactgagactgggtacctggagattctgaagtgcctttgctgtggttttcaaaataataaagatttgtattcaactcaaa

SEQ ID NO: 68 - DNA, 16003 bp, Homo sapiens
  source 1..16003: mol_type = genomic DNA
agacgtgtggagtcccagcagaggccaacctgtgtctcttcatctccgtgagaaaggtgcccccgaagtgaaagagatggcctggtggaaagcctgggtaagtgggagctggcaggagatttgcgttcctgcatggtgttgggtgctggtcaccagggagtcctgagaaatgtaaagtcgcccttggctgggagtggctcagtctacatttggctgcctcctgggccaagcatggagggtgggaaggggccgagaagaaacagtcccaggcctagagtgcccacggcagggatgggacctgggccgggagacaggctgatgaagaaatctagaaatgcaagggggaagctgaggtttgagaagagtccaggggagggacccttgcaggggtggggccactcaaaggagggggtatcatggttgagccttgtgtgtaaatgtgtatggggtgcacacacgtgtgcatttggggagaatcaggcatactgctcctggcagagggaactgtgtgcagagggtcagagggcggggagcttggctttgagggaagctgctcagcacagctcaagggtcctggtaccggaggagatggacctggggaagcaggcagggccaggtcctgaaaggccttgcctggcaggctgaggagttaggctttaccttaagagaagtgggaaggcactgaagggctttgagcatgagagtaacctgaacctgctgttggggacccatcaatgccttcacctcagggatcaatgatgttcatttgtcaagactggagagggaagaggggaagcaggaggacctagcctgctagagcctggaggaacccggggctcagggcagcccatgcccagcagaactgatgggttctcgggagctttctgtctatggttgagcctgaggccatcgctgtgctaaggagttgaatatccagaaggggacagaggtgacatctcccggctcccggctctgcacacccttttcctttcctcccaggcagcctcaggatgtcagggctgcactttctgttttgcagatgatgaaatgaaggctcagagacactgagtgacttgctagggtccaatggccagcaggctccagtcagagagcagttgggtctctctgcccagccccaggttctctgtgagcttttgtgggatacccaggcttgtacagcttcagggagtctctggatcatagatgtcgcaacccaagcaagtgtcctcagggtcagacatgctaggttctggacaggtgggacaaagaggaagccaggctgaggtggggcagctgtcctggcccccagggaagcagccttcttccaggacaaggggccatggaggcctgcagcttcaaccagactgctgggaacctgcctttgaggaggtggacatggcagggagagcccagtgctgggtggtttccaaagtcagttgctggccaaggcagtctggcactgggccttgcacccagtgcagcaggacaaagggctgtccatgtagggacctgccaaattgacaggatcactgtgacactcactgagtccctactctgtggccggacccttctctaagcacctcacattcaatatctcccttgaacctcacaaggagtctatgaagtagacaccagtatccttatccacagatgaggaaactgaggcacaagtaggctaggcaggtgcccgaactcactagtaagtgtgagagtctaggtgagaatctgaacagcctgactccagggccaaaaccataccctggtcgtccataccccatgtgagagctggctcggggtagcaagttcacaggtagaccccacctgcaacagctgagctgctagcgaagacccagtgtcctctaggcacaaagctgggccaggaacgggatgggaggagatgagggagccactggagagagatctgtctgcaggcagggcccatctgcacctctctttttggtgttgccttttcctctgtgtctctcatagagacaaacccatctcccaggcctctgggcagccacgtagcaggggaaggccaaggcatggcagctcccctgtgcctgtcacagaacaagttatattaatagatgtagtcacaggctggtctgagtcaccttttcagtgaaaatgtgcctgtctggactagcacggccctgggcaagaccctgcaggagcctgaggctgacccttccttctcagcaggaggtctggagctccaggactccacactgatagccagggctccgattcccagaacacttattttctaaaaccttagagtgggaagtgagacagaggcttctcaatgcagcaaaatcagaaccagccagggagctgcttacaaatgctgcacctgagacctaccgcacccctgcgggactgcatgctcctcagggatgtggttacacagcctggccactcgctggtgcaccacagcccccgagtgctggggcagagggaagccggcaggcactgagagctgagatgcctcccacattcccagacgacctgcgttcctgtgggtgaagcttccttcagtggaacgttccaggaacactcattgtctgggaaaggtggagtcatcagtagggcaggggaggtagatagagctcagcttctgagtcaggctggggagtcccaacagcatcacttactagctgtgtaagggagtccagctccctttctgtaaagtgaggcatcagtacttacctagcacaactgttgaggaagccatgacataagcattgcttctaaagcacctggcccaggtctggcacacacaaggggcttgaagtgctaacaggagtaatagcagagcgtgactccacaagcaagggatatcgtgtgtgtggacaccgatgagcaatatctgggaccacactggctctctctggatggaatttccataggaattatttctaacaatttctgctgtgaaacatggtgctaagaaatgactcaggaagatctgtcaccagacatttgaaattaaagcaaagagttcagaaagatgccttacctcttactcaaaggaaagatacttacagatataccatccattggaatctctgtattttcacaatctaacccagggcttcgatggatggatggatggatggatggatggatggatgggcgggtgcatagatggatgggtgggtggatggatggatggatgtggtagtcaaatgggtaagtgcgtaggtgggaaagtagatgggcagatgatggaggtgatggaaggaataagtgaacaggtaaatggaagacaagactggatgggactaaactctttttcatcctggaggatctctgagtctccctctaattcaatacctatctccaatatccctccattctctaccattcctccacccaaaacacacttatgtccatgttaatcatctgagaaattctgcagggcacaagtttaaagagccctcaggcaagccctgaactggaggcttggaaatcaagggctcaggcacttggttatctggtttatttcacaatctgcagagcatcgtgcgggtttttctaaacctgacgctctgagccccatgggcctgtggacttgcaaacaccctgaactatcaatatgctcagctgggcccctgccctctaagttgctgtaagtcccaactccccaggaagagggcagactgagctcaaaccattcctcagaaaggcagaaccatgctcagccttccaacctcatctgcacactctgaaggtggtgcatgcagctccaggaagcctttgcttcagtgttctttcccctcctaactttgggtgagtttgtcccttcctgctgctggtgggtgatgctggaaggagctgggtgtggctggggctgctgtctgcagtcagatggcacagacagggacaggaaaggttttgtggcttctccccacaagctctggctctggctactccaccctgttggccaaggggctgaagggcagagcactggcctgcaagggctgagcagatctccgtgcccagggaaggggctcaccctgtcagggcgggctaccagatgggctgggagcctgctctgccctccctgtccctgcctgctttgagcaggcctggttctcttgcagattgaacaggagggtgtcacagtgaagagcagctcccacttcaacccagaccctgatgcagagaccctctacaaagccatgaaggggatcggtgagtgggtgttggcagccttgccacctctgctcaagacccctccgctcacagccctggaaagcgggtgccaggggacatctggggagctggggtgtcccatgatactctgaaactgattccactacccagagaatcacacagccctctgtttctgcagtgaggtcagcacccaccctgcaagactggacaggagggtgctgctcttccctgggtaatgggggtggggaggtgagctgtgtgtctctgtgagtgacttcccatcagtctcagctttctcacttgtaaagtggccccaagaattcttggccttgtgtgtcacatgaagtgtgaagggggtggtgctttatgatgccaggcacagagctgccaggggtgtgaggtgttgggagtttgtggggctgattcaaggcccccttgccccatgtcgatggccatggagccggctcccttcccatctcctgcacttgcccagtgctgccctcagcactaccgtgagtgggcgagggctggcctgaggccagatttaaacagcttgcccagaaagccctcctgacctgagagcagagcatgtaccctgacctcaccccaggtgggactgaccccttagccggctctgcctgaggatcaggggccttaatgagaactgccgctcctgacaagcccagaaaacgttctcatgccctctgctttctgtgaagcagaaagttatctccacttcccaaatgagaaaacggaggcccagggaaatgaggctggctgcccaatgccacgcagttgctgggccaggcctcggattcaggggttggactcttagtcttgaccttcccctactgcgaccaacacaaaggagggcagggccagagatctcactcggccaagctccaaaggcccgggctgatgtccagagccacccagacctcagattccatcttgtgaggctggccttgggcacgccccaacattgtgggggtgtggggtgggaaatggggaggcagatttcctaagggtcttgtttacaccacgaaaatggtctgggggtttggaactatccaggtgtcgggtcccaactgctcagccaccaagcagctgccttcgccttcccctcctccgccctcaccagtgtgtcaccctgggggcagcagggtcacttgtgctgtaaccctgcagggaccaacgagcaggctatcatcgatgtgctcaccaagagaagcaacacgcagcggcagcagatcgccaagtccttcaaggctcagttcggcaaggcaaggggaaggctggtgggggtggggataggtgagccttggggttgggggtacagcctgggaggcagctccattctggacgactttcccctagagccagcccactggtagcatgggcacatggaacctgtttgcatgaaaacaattgttctttattgaaattcaaatgtaactggctgccctgtgttttatctggcagatctacttttaggtgtcagagcccgggccgggggctggccttccttgcttcctttcctgcctcttctctcacagcattccttctcatgcacccaacaggccccactggaggtctgtctccctgcccccaggctatctcgccctgccctctgagcccagaccaccttctcttttccatgccccaggcatgcaggcctggctttgctctgttctggggcgtgggcatgctttcctcagtcgagctgcttgcacccacacctcgtcccttctgccacctgggaattctaagagcctggagtaagcatgccaggccctttgtttctcctcccacctgcactccacccctaggacaaagcctgacatttgggggtacacagtaaacacaggattaaatatgtgcacagccatggttgcctcaagcctctagtgactcatatcattagtttggagatgtaacgaaggaagatcagctcaaatattctcttggagaacccagtatgcatttttacagtttccctctcttagtcctcacagtgatacattctttgtattcaaacatttggggaaactggcactcagagaggttttaagttgcccaaggtcccagagcctgtaatcaacaaggtggggattaaaatccaggtctgacaaagcccttgatctctctgctgctctgtagatcagctgatgtagcctggtggctcctcgtagcaacatgtgaccttagaaggaggcacatgtgagacgaagtctttaattcaggcatgcattcattcattgagtgccaagtgacaggtattttatggtgatgccatactcagagcttgcagtctagctagcaataccaatttcattttactgagagcttatgatgtgcccagcactgcactgaatgctgaattgagtcacacacaaccccctaagcaacgggatgaagcaggagcacgtttctctccgtgtaaccggtaaagatactgatgctaagagaagctaaggagctggcccaagaaacccagccagcacgtggcaaggcccatgcagaatccagcccaagcccctggacccagccaccactccgctgcctgcactcaggtgggcctggcttatgacaaatatcacctttccctgttcccgcattaggacctcactgagaccttgaagtctgagctcagtggcaagtttgagaggctcattgtggcccttatgtatccgccatacagatacgaagccaaggagctgcatgacgccatgaaggtaaccaggcagacagggcaggggagtggcaggggtgctcacatgactgggtaggggcaatgcggggaccgggaacctacagcccagagctccccttgagccactgtttggaatggccatatgggccataactgggcccagtgagcaggcagcctgctgctcagactgcacccaacacctggagtcactggtgcctgattgacacgttgagtggccgtgatgaagccaaaatcagtacttctcagaacctcacgagctcaggtgtacagtggtattggaaacccacctctacagtcccaggcacagccccttgggtttccctttacctctcactactctttgcttttgcagattaataaggatggggacccagtaactatagtcattttgtttggaaagacacttgctgcatgggcactgccaggcattttacacccacgctccctaatctatctttggcgcaggggaggcttcttattcctgtttatggatcgggatgcttaggctccaggacatggagcagcctgtctgagaccacccagctaaggagggagagctgagacagggcttccccgtcacagcacttgccctcaatgttcatcactgaagacaagcatgtgattttctcatcacatcctcccacttcaagtggggcagggcagtgaggtccttcctgaggctcaggcatcttgagaaaagaaggtgtggacagagcagaaggtcatggcagagcactccagcaggcagaggtttctgtccacagggcttaggaaccaaggagggtgtcatcattgagatcctggcctctcggaccaagaaccagctgcgggagataatgaaggcgtatgaggaaggtaaggggtggcacagatggaggggctcaggagtggccacaagctttggcagcctggcagggaacaaggatcaagaattaacctgggccacactagaaaggaccctttggggacttttttacccacaggtgctgagcacctaccgtatgccaagatctgtgcctgatggtgacactgaacatgattcagacttgatctgtaagctcaccagctcctcttacaggggagagaggcctgtgaccaactaaaatctctgcccttgaggactgtggtagtagggggtgtggaccccaggctagcagaggccagtcagtcctccacatcatgtacctagtggggagttttcctggaggctttggctttgccaagccttgagatgaaatggagcttggttggcagcccctagcctggctctctgacctggtccatcttgtgctttgagcttggttgggtacgcatgtcgcttctagttgtgaagcaccacccaggcgacagccacttggacacccgggcattgcatccatgccctgtgccaaggactttctttcctagaaggctttaataaggagaagtatggggaacagggctggaaggaggaaagcaggccccgggtaggctgtgggcctctgcttgtgcctcatggtcctgtttccctgcagactatgggtccagcctggaggaggacatccaagcagacacaagtggctacctggagaggatcctggtgtgcctcctgcaggtgtcacagcctaggctcttgggagtgccttggtttgggagtcccaacagctccaccccagggagcagcccttgaatagcgccacaagagtcagggtatgggcatgggatagcccagcagccagggctcattgggtgtgtctcagcatggttagagggtcccaactgcagagcccccacacttgtccttactcagccatgtgagagcatcctggaagcgggaggagagcaggtccttcgtgcagacctcatgccaggcactttgcttaccttagctcactgaatccgccaagccttatgaggcagtccttaccacccccgttgtacaaatgaggaaaccaagggctgaagagaataactggcttgtcgaagtttccacagccaaagagcagcagagccatgcctaccctccaagcccaggatcccccctgtgcccttaatgctctggtcagctggcctgccttacagagccacctcctctgttcctagggcagcagggatgatgtgagcagctttgtggacccggcactggccctccaagacgcacaggtgaggctgcgcccagccggccatgtggccccaccccctgccatctggactccggctcctctgcccacgggggctttctctgacactgggctgggacccacccagctcagctccctataggcctttgtcctgtggtgtctggggaggagagtgagggtgttgggagactcgggaggaaggagtgtgacttgggggtgggggagcactaaagctctgtcctggcaggaacagcccatgaacccgggggcgctaggccccagtgctggacacaggtgtccgggtctctgtaggtctgcctgctggcagagggaagtctggggaccaggcagttcctagagcagcttgtggcccaggatagagaaaatattctaagccagagctgctagagaaaggggagctccctgtcagagacgaccaagcaggggagcatgctggcctggcagagtggacagggccaggccatggccacagctctgggactctggggctcagtccctcacctccctggtctccctcactggcttattgtgggtgtcccaatgctaggatctgtatgcggcaggcgagaagattcgtgggactgatgagatgaaattcatcaccatcctgtgcacgcgcagtgccactcacctgctgagaggtaccagggagggaggggctggggccggggccacaggggtgtcctggccatgagcctctccctcgtgcttctgccttgtcaagtctagagttagggagagagccagggagcccaggactgtttccccagccaccagtgggaggtcagggcggcaaattgatgtgcgatctctgatccgagacactgaggggcatcacgaggaggtctgaccatcccctgagcagagccctctccacagtgtttgaagagtatgagaaaattgccaacaagagcattgaggacagcatcaagagtgagacccatggctcactggaggaggccatgctcactgtgggtaagagctcagacttgcacgtttttcaggccacagggctcaccgtggggcagcaccaaagaacaaagggcctagggatgcgaccacaagagaaagaatccctgtgtcaccttcacgggatgtccccccgactcacactctgcctgtctccctcacccagggactgctccacctctagagtcccagtgtgtgctgccaaagattgttctctgtgctgcccacgtggtgcccagtgctgtgtgggtgtgtctgcatgagtgtgtgtgtgcgtgagagtgtgtgtgcctgagggtgtgtgtgcatgactgtgggtggaatgtgagtgtgtgtgtgtgagacagacagtgtgtgtgtgtgcgcacacaaatgcatacgccagtgattatgccagccccaaccctgtgtgtactcatggcagccatgcagggagcactctggctgtggttgtgaagccctggccagcacaaagtcatctttctggacatgaaccaggggcctggcccctgccttcattgccagttgaagaaacagtgatgtgtggcttgagtccaaactgagtgacggatggtctgatgctgagaaacactggggatcttccccacagcaggaagtcagggccactcaggaggacccactccagagctctcatgggttccagggctgagatcacaatgggaagagtcactgcagagtaaagagctgaggcccagggcagagggacgtctcttctcccacttacacacagagcccaggtccggactcctggcctgcagctctcacctccacaccaggctgcctccgtgcaaagccagcagccagcaggctccctgctgtttcctagcctctctgggtggacagggccatctgagacaccccagctggccttggatgctgtgatacaatccggtctatgtcaggacatctaatcacacccctgctccaatctcagcttccacccctggatctggcctgaacccaccaagaatgaagtctgccagcagggaatagtgaagccatgcagtgctccgtcatgctgggccttcctattcacttcaccttgaagcctcgcatcagtctcacttcccagatgagtcagggaggttgagtaatgaagccatactgcaccatcaaggcaggaagtgaacacatgcctacctcactcaaagcccatgctccttctgcagccctaagtgaaaatgccaaccttccccacccagatgccaagtctctgagcagtacccatgggagcaagcatgggcccagtctctggaccagacgcccccaggtgccttagtcctgtggggccaaactccacttgtcacatgggaattcaaaatgcagggtttctgctgataagtgtgagagagagggcactctgaggccagcagccaccatcccatggtgcttctgtggagctgagaggctggatttttggtggaggtgtctctgggttgagagcccagggcctgtcctgagtctgagctgcccttggatgggcttgagctggtgtcttcagacgagccccacagtctggtgcatttcacatcttacccttttgcctgcctgcttgggcctttggagctgtgcccagtgccccgggctaccttccctgtcccacgccacctgacacaaagcctctcacattgggaaaggcacggaacaaagaaatatgccaagccttgcacaacactgactcttaagacctaaggcaagacataaagttgtaggcagtgccacctaccagctccagacattaacacagctttcttgtttgccagtgaaatgcacccaaaacctccacagctactttgcagagagactctactatgccatgaaggtaactgtcctgtcttcttcttcctgacgctcaccctacatagcaccaagtgcaaagccaaggagctcaaagccaccacgatcctccacacgggggagttatcttacccaaacctgtcgtggatcagaaaggttttagttctcggaggtgaaattgagtctgggaaagggacgctgcatctccagaggtgaataattccctgaaactaaaaccattgcccgttttctctgattgatggttgctgatatcccctgaagttagttccacacccgaaacccaagccctctggccacttctgcccaggaaatgagagagggcatgcgattcccttggccatgtggccccagctgacatgagactggtcagggatgaaggtgagcaggaaggccctgcctgtgaaattcctggctgagctgattgctgccattgctctagtaggaagtcttgttcctggagcagtgagtattttgtgtctagaatctgatgtggcaaaccaaacatactgcagtttggagcacttggcatcataaaggaagagttctgggcagtgggtgagaaggaattaagggagtggacaccctaagccaccaaagcttccctcctaatgcttccctggctgaagcacaggctccttcccacatctccctccctctaaaagccccagaacccaaccacacagatccgtccatcactcagagatggacaggaaaggtgaggcaggattgttgatggctgctgtcttgcccagggagcagggacgcgtgatgggaccctgataagaaacatcgtttcaaggagcgagattgacttaaatcttatcaaatgtcacttcaagaagatgtacggcaagaccctcagcagcatgatcatggtaagcaggcattcccaatgctgaggccagcctgaaacccagacattcagggaaacctggaggctgtggccaacactacgtgagcccctcccttcccagtgggcaccatgtgcttgcattcatgaccatgtggtgtgtgcagggaacagcagaggtcagtgtggctggatcccaaggggaatggggggcagaggggagatgcagagaccagggcacagaggctcccctgtgtcccactcagaaagttggtttcacatttaagttatggttgctccttggaaaagacaccaaatccttgcagaagaagccacctctgaatagtcaatgagatgaactagtccggtaggaatcgggcccaccgctcaaatccagatttaagtagtcctggcggccaacttctaaggagataagtcagatgagcgccaatagactatctaaccagattccaattagcaaaagttctggagccttcaaaacacagactgattatcacgctgcgataattgggagaaacagctcttctgggggtgtctgcaaattgaggtcttgatgatttcattagcagaagtcacattaggacaaatgtatccccaagttttctttggctactaagtcaagtctctagctcttctgcaaatgtcgttgttaagtgcacttttcaagaaacacatagctgacaataggtggaaaagacatttctgtttccagatgtttcaagatggcaacatcttgaaacaggtgggcaggggcaagagaggattggaattattcttggtttcacttgaggctccccagccaatcttgtcgggagacaggagggcaaggcacacaccagcctggactgtgctgtcacctgcagacagtctgagctgattgtcattaacccttttaaccacacatggtaacttacggcatcagagagatttctacagatacatgaagccaccctcttcaaattttatctaatgttgttacttaagaaaattgagttagaatcatgaatacattgaccaaacattttctttttagtgtagaccacagatgtcattaaagcaaaaatggttttcaacactaatatgagttaaaaactcctgcattgaaattaagaggcaaatgtataaacacttcaagtataactcatgtatttgaaaaagtaaacaaaattaatgcttttctttctaaaaactattagaaaaattgtcttcaaaataataaaaatcaccaggcgtagtggcccacacctgtaatcccagtgctttgggaggccaacgcaggaggatcgcttgagcccaggagtccaaggctgccgtgagctaggactgcatcactgcactccagcctgggtgacagagtgagaccgtgtctagaaaggaaaaagttaaaaaaatttcattgtagtttgaaacccgtaatgagatttcaggctcaaagcaggcaaattttactaaatggtgaaaagtagacaataaccatgagacctaaactggtccagagtgtggaaagtgggtctagccccagtctaccccttactcaccatgccgttgtgaatgaattcactcccctctcttggccccgctgtcctcaactgcatgaagaagaatctgggtgatctgacctggcccatttcccagctctgtatgcagaccccggactagccagtcccatcaggacctaccagtatctaagaaacagggctcctcagtcatcggaccacaaggtcagtctcatcaggagacaaacactgtggacccgatgtgagccagatgcagggcagaccagctcgccttcctcctgctgtaccctcaccacgtctcagcaagatgcacagcagcacagcattgatctcatttcatagatgagtcccacagaggtgaaggggcttgcctcggccacaccgtcagggtgcgatggtccaggctccctccacccccggccctgctcccaggtgtgtgctgatgcctcactctcagccttgattcccaagctgccacagcaggtgttgaataatgatgcatcgtgttgtgtaaatgaatggctgggcaccctggctcccgaatagaagaaccctgggacagctgaccccttccttgtttaggagtggaactgtctctgattcattttccacatcaatcctgcatgtagttggtaagagaatcaaaaggaaatgtaaaggaatagcctgaaattaaaaaccaggaaagaggggtgatggcacaacccctgcggctaggaaccctggagggccgggccaggtgcaggccaggggcacacctcttagtcataataacacagccgccactgccgagccaggcacaaacaaaccccttctcacgcttatgcgcctcctacccacaggaagacaccagcggcgactacaagaacgccctgctgagcctggtgggcagcgacccctgaggcacagaagaacaagagcaaagaccatgaagccagagtctccaggactcctcactcaacctcggccatggacgcaggttgggtgtgaggggggtcccagcctttcggtcttctatttccctatttccagtgctttccagccgggtttctgacccagagggtggaaccggcctggactcctcttcccaacttcctccaggtcatttcccagtgtgagcacaatgccaaccttagtgtttctccagccagacagatgcctcagcatgaagggcttggggacttgtggatcattccttcctccctgcaggagcttcccaagctggtcacagagtctcctgggcacaggttatacagaccccagccccattcccatctactgaaacagggtctccacaagaggggccagggaatatgggtttttaacaagcgtcttacaaaacacttctctatcatgcagccggagagctggctgggagcccttttgttttagaacacacatccttcagcagctgagaaatgaacacgaatccatcccaaccgagatgccattaacattcatctaaaaatgttaggctctaaatggacgaaaaattctctcgccatcttaataacaaaataaactacaaattcctgacccaaggacactgtgttataagaggcgtgggctcccctggtggctgaccaggtcagctgccctggccttgcacccctctgcatgcagcacagaagggtgtgaccatgccctcagcaccactcttgtccccactgaacggcaactgagactgggtacctggagattctgaagtgcctttgctgtggttttcaaaataataaagatttgtattcaa

SEQ ID NO: 69 - DNA, 18329 bp, Homo sapiens
  source 1..18329: mol_type = genomic DNA
aaaagagaaggtggatggagaaggggaaactgggcctcagccagcaccgggatgatgcgaccagctttgtcagcacgcttggggagcatacacaccgcttgccttggctggaccggagactgtgatcaccacccttccaacccatcccccaacacgcaggctggcatggccacgcccacagtgccccaagtgctgcctgccttgcagtgactcacttcctctgtatgggctgctgaactgtcccaaggagaggacaggccatctccaggccttcagccccgagtttagatatctgggcaggctttgtggatgggcaagcatacagggagcccaaatgtggaaggtaggttttttcaggtcaggtggaactgttaacactgaagcctatttgggtaagaagcagagcctagctagtacctaatggagattcaggggccaggagtatcggggaggaaacatttcctaacagagaggtaaaatagccaagaggagtttctatgtattctgaaatcaggcaatggaaagtatttgcagaaaagcaatgtagggaccaggcgtggtggcttatgcctgtaatcccaacactttgggaggccgaggtgggtggatcacctgcggtcaggagttcaagaccagcctgcccaacatggtgaaacctcatctctactaaaaatacaaaagttagctaggcatggtggcacatgcctgtagttccagctactttggaggctgaggcaggagaattgcttgaacctaggagggtgaggttgcagtgagccgagatcatgccactgccctccagcctggcaacagagtgagactccatctcaaaaataaataaaaggctgggtgcagtgattcatgcctataattccagcactttgggaggccgaggtgggcggataacctgaggtcaagagtttgggaccagcctggccaacatggtgaaaccctgtctctactaaaaatacaaaaattagctgggtgtggtggtgggccctgtaatcccagctactcgggaggctgaggaaggagaatcacttgaacctgggaggcagaggttacagtgagctgagatcacaccactgcactccagcctgggtgacagagtaagactcggtctcaataaataaataaataaaagcaatgtgggacttggaggctgaagaggtggacatgcatgaacagtggaggcggtgtatgtggctgcctttcccctgtattccactgagagggagcccaaatctgcctcgcctgcattgagggatgaagaaaacactgagaggcagctgagaaacatggatgctagttccaactccatggcctcgggaagtcactcagactccttgagtcagtaatgaaaaggtagtagattagaggctgggcgcagtggctcatgcctgtaatcccaacactttgggaggccgaggtgggcggatcacaaggtcaggagttcaagaccagcctggccaacatggtgaaacactgtctctactaaaaatacaaaaattagctgggcatggtggtgcatgcctgtaatcccagctactcaggaggttgaggcaggagaattgcttgaaccagggagtcggaggttgcaatgagccgagatcgcgccattgcactctaacctgggcaacagagtgagactctgtctcaaaaaaaagaaaagaaaaggtggtagattagatcctctctaagatttcctccaactctgcaattctaaaatgtacaacatggggaaggaaggtgatcagtacaactgtaaacaactgcaatccggccctgaagttgaacaaaacaaaacctagggagaggaatgagtttgtagcaggtttcaatgcagcgattgtgaacgcatcacacacacactcctcacaggcaaggacttcgcttctgccatgtgactgagactctgttggacttctccaaattcagagttcagcctggcatgccggccaggagccccttggagagattcggcgtgaggaaacaggaggcctcacgcttccttcggttctccctaaatctgctgggcaggtagccagaagaaactctgaagggtacagaaagccgagggccagggggaccccggctgcggagctgcagtaccgtgtttacccagcctaactgcggtcacccagtctcctgcatgtgtctgaggtcagcctcgggggctcccctgagtaggtatctacctgaggctcttcccctgatgctacctgcataccaattccacccaggaacctggcgtcctcaggaggctgcacttcccaagtgggctgagacagccccttaatatgtggggctggagccagagacctcaaggggccactagggggctcgagactctcagtggctgctgacgccctcttgtggccattttggggattggccagaaaagtttcagaagcgagccaagatcggaattcttaaggaggtaagtaataacaacagtaacagttaccatataacaatacttatcgttatatatttgataacattgtgacatttctacttaacagcgctgtgcccagaactcttctaagtgctttatatgcactgtagttatttaattctcacaacaacctataacataaacactattacttgtctgttgatgatgaggaaactgagcacagaatagttgcccaaggtcacacagaagaccagaatcccgactctgagaagtctggctccagaagctttgcttttagccaccacgctgagactgagttccattttggggttgtcaggtgaaatacaggacacactgttaaactataatttcagataaacaaaaaataataattacaggcggtggctcacgcctgtaatcccagcactttgggagtccaaggcaggtggatcacgaggtcaggagttcgagaccagcctggccaacatggtgaaaccctatctctactaagaatacaaaaaattagccaggcatgatggcaggcgcctataatcccagctactcgggaggcggaggcaggagaatcgcttgaacccgggaggtggagcttgcagtgagccaacataatgccactgcactccagcctgggcaacagagagagactccgcctcaaaaaaaaaaatgttagtatatttaatgaaatatttgggtcatacttgtaccaacaaatgattcctcatttacgtgaaattctgattaagctgcatgtcctgtatatttatttatttaatctaatacccctactttacagggcacttttctctgccacatgcaattacacagattactttttttttttttttttttttttgagacggagtctcactctgtcgcccaggctgtggagtgcagtggcgccatctcagctcactgcaacctctgcctcccaggttcaagtgattctcctgcctcagcctcccgagtagctgggattacaggcatgcgccgccatgcccggctaattttttgtatttttagtagagacggggtttcactgtgtaagccaaggctggtctcgatctcctgcctcatgatccacccgcctcggcctcacaaagtgctgggattacaggcatgagccaccgtgcctggccacattaccttatttatttatttatttatttatttatttttatgagttcaatagtttttggggacaaggtggtgtttggttacatggataagttctttagtggacacattacttcatttaatcatcccaggaaacctgtcctcggaggccccagcatgtcccacagcctccgtctctctcaatcctcccatttagagagctgaaaggactagcgaagcttacagaacataggtggcagagctggatattgaaccctcattctccagttctgacacaggtgcatgttttccttttaacaggagagaaaagtgaggagcagtgattaccgccacagaaatatcctttcatggcgtgtcctccggcatggtctactcagtgtggtggagccactgcaggtccctcctccagggatgtaggaatgccagtgaaggccttcctgagttgggagagaggcagaggagtgagtggaggcagggctgtagcttctgtgccccgcccctacccaggctctccagggaggcaggaaagaggctgtgtttagacctgagggagccagctgtgaggctggagcagttgctgcatggcggggcgggggctccacagggctgttcacctgctgctctgtgcagagacagcctcaagtccagctgctggggttgcatcacctgcagctaaaacagccacagggcccaggctgccaaaaggcaacagaagcaatctaagaaaccaggcaagggagcctcccccatctccctgttgccttttgggagcatagagcttccctctgaaggtaacaccctttgcatttttctctcttgactctgttcatcaacttccactcccaaatacttgtgcccttccttctccacagatatacacaatccctgggcactctccacctaggtcagctggctctagtaaggcagcagtcaagggagtttctgggctgggaccccctctggggtgcaggctggggtgccctgctggtatgtgccccaacaggtttttccctatcagccttgaaatcagcctgcagcctgtctgacctgccccccagggagctggagccagaggcagagccaggtcagaagctggggcagagccaggtcagaagctggactttgagactaggtctctgtggtcccacctggacccacagggaaggcagtgcataaaagcctcctgtgtttgaggctgagccgctgagaggctgagtggagttcactcacatggattgaggcccagttcctgggagaagagatgctgggcaggaaggtgtctgcatgtgggactctgtacagcccggtcctctcccacgtctgggaggggccagagtcagacaactgctgggttcgtccctaagagaggtcatctgactggctgttcagcctaggctgcacacacccccactttcctctaccaggccacaccggaggcagtgctcacacaggcaagctaccaggccacaacaacgacacccacctcacctctggcacctctgagtaagtactgggcccacggccccatgccaggagggcttgttgattgcttgggggagggaaaaatgagttttccttttccaacatgagagtgcctcctttctgtccaggcatccacgtacttgcaagaactcttgctcacatcagctaagagattgcacctgctgacctagagattccggcctgtgctcctgtgctgctgagcaggtaggcagctgtacaggcaggaattgagggttgcttgtcagctggggctgccggtgggggaagatgctatttcgagttgtcttccactctgcgtggttaatcctgccacctcacctcagctcccctgcactgcccaggagaccccagccaggcccaggaaggagggccatagacctcagaagggaggcatctaccgcggaccaaggcctgaggagctttggtgctgaccctggcatcagggagggttggcgcctggtccaggagcattccgcatcaatccccacttcctaaaggagtggggagaggtggggaaggtgggggctcccctcttacctcaccatttcagctccatttctggctccaagcctaagcaggttgatctttttttctgcagcaaggaaaggaacaggtgactggaacccagggtccagggtctcgggggggtcataaggagtccctgaagggccaggaaattcagctctgtgggctcctgtttccttccccagggcaaccagtagcaccatgtctgtgactggcgggaagatggcaccgtccctcacccaggagatcctcagccacctgggcctggccagcaaggtaggggctgttgggattttagagatcacttttagtatctcagctcgggctgtgagaggatgggaggcaggaaagtggaggacaggccctgaggttatgctgaggaggtgtaggcagcctggccctggcccttgccaactaccctgtgctcccacagactgcagcgtgggggaccctgggcaccctcaggaccttcttgaacttcagcgtggacaaggatgcgcagaggctactgagggccattactggccaaggtgagcccctttcccccggcacttgagactgccttttagagccaatctgtagaccaaggaggagccaggaaggaggaactagtgatgttggagaaatgtttgtggaatgccttcattcttgtatgtcaggcgccacagtaggtgtgtcaaacccattctcacaacacccctgtgaggcaaggcttattatttccattttccagatgaggaaactggggctcagggagattaagaggcttgcccaaggtcactcagctcatgacggaggtggtattctcatctaggtcagccgatccccccaagtcgtatttttttttaaccaccacaccaggccacctttgccttggtctgggtcagatttgcatgctgttttgacattttatttgcaacttcttttgagataaaatggaagtgggggtgatatagcccctgctcctttccttcccagccctctcctggagcgccttccctcctccaaggagtaggaacatcccactatgtaaagaccctgctcacagcacagccctcatctcggttcaggcgtggaccgcagtgccattgtggacgtgctgaccaaccggagcagagagcaaaggcagctcatctcacgaaacttccaggagcgcacccaacaggtgaggccatgctgacctcccacagcagtggactggggtgagaaaccccctggaggactcgagagacagcaacagccgctgaggccagcccctgcttcctggctaaacagggcctgagatgaaaaccagccaaatcttcccaaacctccccacacttctggggcccttcccctcacccccgtccctctgctgtgaggaccatttattgtaggacctgatgaagtctctacaggcagcactttccggcaacctggagaggattgtgatggctctgctgcagcccacagcccagtttgacgcccaggaattgaggacagctctgaaggtagcaggaggggagacttgctggggtgtctggggaagggagaaggctgtcagccttgcttttgcaagacgagagtccccctctcgtcgtcccatattgtttcttagaaggagaagcagccagcgtctgcccctctgtctgccatcctaatgacacggccagtctgagagtagactcccaatttcttgtaggcctcagattctgctgtggacgtggccattgaaattcttgccactcgaaccccaccccagctgcaggagtgcctggcagtctacaaacacagtaagaatatagagggaggggtcccagatgctggagaaggggctgtaggacaggccactcctctcctgtactccccataggtgagctatctggcaacctggctgcctaagttctattcccttggggtctttcctcttgcccccaccagtgcctcagtctctcaggggagagacccagatgtgatcattaaaaaaagagaagcaggccaggtacggtgactcatgcctgtcaccccaacactttgggaggctgaggtgggcaggtcacttgagcccaggagttcaagaccagtcacaggcaataaaggaaaacctcatctgtgctaaaaattcaaaaaaaccagctggtcatggtggtgtgcgcctgtggtcccagctactcaggagtttgaggtgggaggatcaccccagcttgggaagttgaggctgcagtgagctgagatcgtgccactgccactgcacaccagcctgggtgacaggagtgagagcatgtctctctctctctctctctctctcacacacacacacacacacacacacacacaaataaagagagagaagcaatgattaaccatcttaatctggagctccaaggcagattccaaagtgacagtcccaaaggtactcatgtcaccttcccagccccttgccatccctgccatcacaccacattccaagctgaacccagccatgctgcagcctgaggaaaaggtgggaatctgccctctgagtcatgggtgtcacctttcatgtccctgatggctggccttgcttggctacaagtgtctcacccactaatttgtggctttttcccatcctcatcttaccaccccttccccccacccctacctctttttcttgctttccccaattttcctttgatgtctaatcttggcctatgttcttcttttgagacaaggtcttgccctgtagcctaggctgtgcagtgatgtcatcatggctcactgcagccttgacccttctgggctcaatcagtcctcccacctcagcctcctaagtagctgggactacaggtgtgccaccaccatgcccagctaaattttgtattttttgtagagatggggtttcgctgtgttgtccaggctggtctcgaacttctgggctcaagccatctcctgcctcagcctctgaaagtgctgggattacaagcatgagccaccgccctggccgtggcctatgttcttaatccctctcctaccttccttccttcttgcatctgtttcccttttctctttctttttctccctttcctgctcttttccttcctcatatcccacctctcatatcatttttccttacctccaatgagggtgccaggtcctaaccatcttgtgttataatacgggtttccctagctcttcttcactgcctggccccaactctaataatggttgcctcctgcccagcaggttggtgcttggtgatgaagccactgcacacctcacaacttagagatgtttttagagtggccgtgatggtacttgtgccttacatcctgggaattagcagccatcaagctactccaagcaggggctagcagggctggcagggtatagcgggtcaggcatttggcaggtcctggggatatctacactaggaaaactcaggaggattcagagagctcctcaccccaccccagatttccaggtggaggctgtggatgacatcacatctgagaccagtggcatcttgcaggacctgctgttggccctggccaaggtgaggaggactgacctgcaaggaagggagtcacgttcaccaggcaaggagacacgctggagcagggagcattgctgtcctgtaatggacaagagagggctttaggggagaccagccttcgcttgttggtctgaagataaaaaggtgcccttcaaagagccctctaagaacagtttctcctcctaggggggccgtgacagctactctggaatcattgactataatctggcagaacaagatgtccaggtgagcagggggtttaggagtgtgcacagccgccatgcacataagatgccttcctccaccatatcttagagccggtgacctacgtgcccatttttcccgcaaacccatccctgccttggagagggagttctcagttatgtggtaggggcaggaggtgtcaggtagcgtcatagctgaagccttttcactcatctagcctctgactcctgagctcatcaactgacatattctcctctcatgagcgtttgggggcagaaagcctcctcagaccttttggggattatttaatcctcgggtaccaggatttttccaaatcagtgaatagagctgtgaggctgtaagggcagagccctctcttagccctatttctttcttaaaaaataaaaaacataagataaaaaaacataaataaaaacaactagtaggccaggcatggtggcttatacctgtaatcccagcactttgggaggctgaaacaagaggatcacttgagcccaggagtccaagaccagcctaggcaacatagtgagactctatctccacaaaatatttttaaaaattagctgcacctgtagttccagctagctaggaggctgaggtgggaggatcgcttgagcctgggaagttgaggctgaggtaagccctggtcatgccactgcactccagcctgggtgacagagagagaccccatctctctcgctctctctctctctctctctcacacacacacacacacacacacgcacacacacaaacctagtttacgggttaaaataaactttctggctggtcgtggtggctcacacctataatcccaacaatttgggaggccgagacaggtggatcacttgaggtcaggagttcgaaaccagcctagccaacatggtgaaaccccgtctctactaaaaatacaaaaattagccaggcatgatggtgagtgcctgtaatcccagctactcaggaggctgagcctggagaatcacttgaacctgggaggcagaggttgtggtgagctgggatcacaccattgcactccagcctgggtgacagaatgagagtccttctcaaaaaaaaaaaaaaaaatccttttccaccctcaatcccatttccatcatgatgatgatagattctggaacgtcatacccatggctccctaggccccaaccaatgatcctgattgactcctccctgactcattcctccctcctaggcactgcagcgggcagaaggacctagcagagaggaaacatgggtcccagtcttcacccagcgaaatcctgaacacctcatccgaggtacacacaagccttcttgtccccctagcttgctctaatgatcagtttgggctgaggaaggtggggagggcccatcctttccagagataattaatcccccatccatctttctaactgcctcctacacacacaagtgtttgatcagtaccagcggagcactgggcaagagctggaggaggctgtccagaaccgtttccatggagatgctcaggtggctctgctcggcctaggtaggggcctgctcaggatttgtgaagtaagtctctcttgggatgggagattgtggtcctagttgtgaacctccatccttccatctttgtttccagcttcggtgatcaagaacacaccgctgtactttgctgacaaacttcatcaagccctccaggtgagaggggcactcctttccctccccagaacagaaactggggaggagagaggaagtctcagcttgctgcttatgtaaccatcctatatacaccgtctaaacctcaagccgctctccttcccagggcttacacaccagggcttacacaggggtggaggaatgagctgtggtgagaactaacttagttggctcccaggggccctgaaactaacattttggccttgttaatgtctaggtggccaaatagagatatgaatctgctctgtaagacagtgccttgtgcaggcttagttgttgccagagtgatggtgataacactagcaagaataatgacaagggctggcattttgcaggtgctgattgtgtgccacagcctatcctgagcagggcacacatatttcaattaatcctcacaaccatatccatccgtatcttatagatgaaaaaactgaagcccagagaagttaagtaccttgcttgaggtcacgtagctagtaagttatacagtctccctacacaacacttcacgatgtaagatattgaccatccttgtcagctatacgataagtgctcttagcacccaaggccccctttctccacgctggtcagattttgttccacattatccatacttttttttttttttttgagatggagtttcactcttgttgcccaggctggaggctggagtgcagtggcacaatctcggctcatggcaacctccgcctcctggattcaagcgattttcctgcctcagcctcccaaatagctgggattacaggcgcccgccaccacattatcctaattttttgtatttttagcagatgcggtttcaccatgttggtcaggctggtctcaaactcctgacctcaggtcatcaacctgtctcggcctcccgaagtgctaggattacaggcgtgagccactgcgcccagcccatattatccgtacttaaactgctgactgtggcttgagtgcttccaccaatagaatccagttattctgttgattgaattaggtctcctattagtagaactgtcccccaaaatctataaataaaaagttcaggaagggcgcagtggctcacgcctataatcccagcactttgggaggccaaggtggatggatcacttgaggtcaggagttcgagaccagcctggccaacgtggtgaaaccctgtctctactaaaaatacaaaaattagccaggcatggtggcaggcacctgtaattccagctacttgggagtctgaggcaggagaattgcttgaacctgggaggcggaggttgtagtgaaccaagatcacgccactgcactccagcctgggtgacacagtcagactaaaaaagtagttatcattttggcagatggaatagctttctgtagactggttgagaagccatcatgccatgttgatgattgcccaaaagttagtaaatataagcaattgttctgtcatctagagatttctatcttgacagtagattattatacttgcccaataaagcctgtatgattataatgagtcaacactaagattcatttgaagagttgtacttatctgtccaaattcctgtcataaatacaaactatcccagcagtagatgattttgtagtgtatttggattacaagacccacactcttgagtgtagataaaagatttatcttagaagtagtagtcaggggccaagcatggtggctcacacctgtaatcctagcactttgggaagctaaggtgggaggatcgcttgaggtcaggagttcaagaccaacttaggcgacatagcaagaactcgtctctacaaaaataagaagaaaatttgccaggcatggtggcacctgcctctagtcccaactactcaggaggatgtggtgggaggattgcttgagcccatgaattagaagttacagtgagctgtgattactccactgcacttcagcctgggtaacagagcaagaccctgtctcaaaaaaagaaaaaaagaagtggtagtcagaaaataacataggcccatttttctgaaaaaaaaaattttttttttgagatagagtctggctctgttgcctaggctggagtgcagtggcgtgatctcagctcactgcagccttcaccttctgggttcaagtgattctctggcctctgtgtcttaagtagctgggattacaggcgtaggccaccatatctggctaattctgaattgtttctaaaaaggaaaaactcgggctgggcgctgtggcgcatgcctgtaatcccaggactttggtaggctgaggcgggtggattatttgaggccaggagttcaagaccagcctggccaacatggtgaaaccccatctctactaaaaatacaaaaattagccagggggtagtggtgagcgcctgtaatctcagctacttgggaggctgaagcaggagaatctcgagcctgggaagcagaggttgcggtcagccgaggtgacgccactgcgctccagtctgggtgacaaagtgagacctgcctcaaaaaaaataaataaacaggccaggcgcggtggctcatgcctgtaatctcagcactttgggaggccaaggcgggcggatcacgaggtcaggagatcgagaccatcctggctaacaaggtaaaaccctgtctctactgaaaatacagaaattagccaggcgtggtagcgggcgcctgtagtcccagctacgctggaggctaaggcaggagaatggcttgaacccaggaggcggagcttgcagtgagccgagatcgcgccactgcactccagcctgggcaacagagtgatgctccatctctaaaaaaaaaataataataataaataaataaacaaatataaaataaataaataaggaaaaaatcatgatacatctgtattattctttttatttatttttatttttatttttttagatcgagtctcactctgtcgaccaggctggagtgcagtggcgcgatctcggctcattgcaacctccgcctcccgagttcaagcgattcttctgcctcagcctcccgagtagctgggattacaggcgctcaccaccatgcctggctaatttttgtgtttttagtagagacggagtttcaccatgttggtcaggctggtccttaactcctgatctcgtgatccacacgcctcagcctcccaaagtgctgggattacaggcctgagccaaggtgcccggccttcttcttcttctttttttttcctttgagatggagtctcactctgtcgctaggctggagtgcagtggcacgatcttggctcactgcaacctccacctcctgggttcaagcaattctcctgcctcaccctcccaagtagctggaactatagttgcccgccaccacatccggctaatttttttgtttttagtagaaacagggtttcaccacgttggccacgctggtggcaaacttttttttttttcttttttaagatggaggcttgctctgtcacccaggctggagtgcaatggcgcgatcttggctcactgcaacctctgcctcctgggttccagcaattctcctgcctcagcctcctgagtagctgagattacaggcgcccgccaccacgcccggctaatttttgtatttttagtagagacagggtttcaccatgttgaccaggctggtctcaaactcctggcctcaggtgatccaccagcctcagtcttccaaagtgctgggattacaggcgtgagccaccgtgtccagcctgtattattcttttatgagagatatgtagatatatgaaaacataaattgtgaagaatatttattcagaaaaacaaccttcagaaaatcagcaatggctgattcaggacaaatttccaccaatctgtagtaaaaattaatgttcctggtgaagatcctagggccatatgcaatgccaggtatacgattaagtattataattaggccaggcatggtggctcatgcctgtaatcccagcactttgggaggccaaggcaggtgaatcacccgaggtcaggagttcgagaccagactgaccaacatggtgaaaccccgtctctactaaatatacaaaattagctaggtgtggtggtgtgcacctgtatttccagctacttgggaggctgagataggagaattgcttgaacctgggaggcagaggttacagtgacctgagatcgcaccactgcaccccagcctgggtaacagagtgagactccatctaaacaaacaaaccatatatatatatgctgaagcgagcagatcacttgaggtcaggagtttgagaccagcctggccaacatggtaaaaccccacctgtactaaaaataaaaaaattagctgggcgtttggcacatgctatagtcccagctgcttgggaggctgaggcaggagacttgcttgaacctgggaggcggaggttgcagtgagctgaattcacgccactgcattccactctgggtgacagagcaagaaaaaagaatacttgtacaacaatgagagtattcagttaatgagtgactcttgcccaattctgtaactttagagtaacaagcgttggaagaagagaagaatggatactggggagcaattggcaatctttatgacaatacaaaactaatgatgcataaaagttaaaatgaagtagacattaggtccactgacaattaggtaatgagtctaaatgaattggagcatcctgttttacttcattttcttttgttttgtcaaaggagtttatgatctattgggatgccctaagtatgtgttgtaggcagttctgggaagagtcttgtgagtaaagtgactcaggaaactctgaaaatgaggatattaggaattgatgacaacactggtgcacagaaaaaaaaaaacacaggaattttacaattaaaagtttttatttaaaaatctctcataacaacacattacttagtataatcaattataattcaggattttgatgacttgtacctgtgttatttcttttcttttctttttttttgagacggagtcttgctctgtcccaggctggagtgcagtggtgtgatctcagcttactgcaacgtccgcctcccaggttcaagcaattctcctacctcaccctcctcagtagctgggattataggcgcctaccaccacacctggctaatttttgtagttttaatagagacgggggtttcaccatgttggccaggctggtctcgaactcctgaccataaatgatctgcttgccttggcctcccaaaattctgggattacaggcatgagccaccacacctggcctgttatttcttttttctttctttcttttttttttttttttttgagacggagttttgctcttcttgcccaggttggagtgcagtggcgcgatctcagctcactgcaacctccgcctcctgggttcaagcaattctcctgcctcagccttccaagtagctgggattgcaggcacccaccaccatgcctggcttatttttgtatttttagtagagacggggtttcaccattttggtcaggctggtctcgaactcctacctcagatgatccacgcgcctcatcctcccaaagtgctgggattacaggcatgagccactgtgcctggcctgttatttctaaactgaacctttcattactttctttagccaaaaaacaggcctgctgcatgtacaggaggaagatagcaatgtttcagcctaagggtccaaccggagaaactaatatgcagagatggggctgtgagatggccctattgggttggaatcagaactagaagtcacacaaccttgaaccctatcagagcctcatcagctcagtttagggatagggcaggtatatcctccttggatattcactaacttgaaagttaaaagcagttttcctggttttcatgctggcagtctttatatgcaccaaatcttttctagccttcctggtgtacctatctttggagctgctcaccaccaaattctggaggtacacagctctaagctaatggtaggggcaggaaagacatgtggaaagaaataaatactcaagctgcccccacagagactgatctttcctgctgtgtcatcttccttgaggatggacaaacataacttttgtcccgagataatgtataatgtacactcttatcccttgactcccaccttgcctccccttcctacaataaccctccaagccattcaacccctactctcagtgagactctcactaactaccccccatctctttcttcccctactaggaaactgagcccaattaccaagtcctgattcgcatccttatctctcgatgtgagactgaccttctgagtatcagagctgagttcaggaagaaatttgggaagtccctctactcttctctccaggtgaaacttggctacttcttagcctggagcctcaggccttcactcctcacctccaccctcactccctgcacacagctgagcatattcttgccccatagaaaacccagtagttagccaggcacagtggctcacgcctgtaatcccagcactttgagaggctgaggtgggcggatcacgaggtcaggagttcaagaccaccctgaccaacatggtgaaaccccgtctctactaaaaatacaaaaattagccaggcatggtggcgtgcacctgtaatcccagctactcaggaggctgaggcaggagagtcgcttgaacccagaaggcagaggttgcagtgagccaagatcgtgccactgcactcccacctgggtgacagggcaagactccatcttaaaaaagaaaacccaggagtctttggttaatgtagtgcaggactctgagctcccgggaggacccttccctcccagatgaactgtgatggaccagcccaaaggaggggagagagcacttgggccatagtggtggtggatctttctaacactgaattcccttgtctgcaggatgcagtgaaaggggattgccagtcagccctcctggccttgtgcagggctgaagacatgtgagacttccctgccccaccccacatgacatccgaggatctgagatttccgtgtttggctgaacctgggagaccagctgggcctccaagtaggataacccctcactgagcaccacattctctagcttcttgttgaggctggaactgtttctttaaaatcccttaattttcccatctcaaaattatatctgtacctgggtcatccagctccttcttgggtgtggggaaatgagttttctttgatagtttctgcctcactcatccctcctgtaccctggccagaacatctcactgatactcgaattcttttggcaaa

SEQ ID NO: 70 - DNA, 95200 bp, Homo sapiens
  source 1..95200: mol_type = genomic DNA
atccagatttgcttttacattttcttgcctgagtctgaggtgaacagtgaacatatttacatttgatttaacagtgaaccttaattctttctggcttcacagtgaaacaagtttatgcaatcgatcaaatattttcatccctgaggttaacaattaccatcaaaatgttttgtggagactatgtgagtataatgcttatttctgtaaagcttttcactcttttgaaacttgatttataaaatttcatttgtgttttttgacgtttttaacagaaaatgttgttctaatttgtttttattcttactactttcttactattttatgcccattttttgaaagaaacatttatagaatatttaaattttatttctgggattattaaacattactatgataacaagatttttttaatgcaattatttgctatgcttctgaagcaaataaagaaaactgaagattaaagatttggatttgagcatacctaagaatccatttaattagtgggtcttcaatataactattaaacagagttaatattatgaaatcttaaatccatgctaattttgaaacaacgtattatcccacagaggcaagttactttcatatgtaatttgattcagaattctaactgaagttatcataagattttttatctcgatatttacttctatctataaaaaattaaaataattttgactattaattttattttaaatccatgctttctgtaaaagatagcttatttttgaataattttctgttgaatagaagcaatgtataacaagatttagtcttttttttggccttgtctgaatcattttagtccaactgctctaatagtcattcactttttaaaaagccaacatgaacattaagttgtctgaatatgctttatatgaaaaggtctccatttcacatggtcttgaaaattatatacaaatgtgaatttatgccttgtggtcttagaaattatatacaagtatatgtgtgttaatgatgattctttacaaatctatactataaaaaaactttcaggagactgaggcaagagaatggcgtgaacccgggaggcggagcttgcagtgagccgagatcgcgccactgcactccagcctgggcgacagagcgagactccatctcaaaaaacaaaaaacaactttctgggaacttttatgcaaaaaaattataacataattattttgttaaactttggcacacaaaacattgtttactcatacaaagtaatcaatgcaggaaaattttacttatatattgtgtttcttaagataaatactgaattaggacttaaaaggcagctattttccatcactgttagtttaacaatcttaatttcatcttaagatttcaagatctcattttgcagttgaaagttaccattattgttttattaattgtaaggtggttatatttcactacagagaaaaaaaggtatcaagtaattaggccagcatggtaaatgattaaatttgcaaatgcctattgttttctctctctgttcatttgagtatagttatttgggagtaattactattatattctatgcattgtgtggtctaatgttactatttatatgcccatttttcaaaagaaacatattttatagaatatttaaattatatttctgggattattaaacattaccaggctaacaagattttttttaaatgcaattatttgctatgcttctgaagcaaataaagaaaactgaagattaaagatttggatttgagcatacctaagaatccattttaagtacttttgattagctattttagagatgaatgttatgttttatgtataatctcagcaagcctggatggtaaaatggttttacataatcaatatcagtatagtttaaagtaattttctatcttaaggtatatgaccccagtggtcagaatttagtgctaaaaaggccaatatttgaggccaagcttatctctttaatcggatgttctcaagcaagagactggctcttctgttgacaagtaatttcttattttataatgtgggtagtaattgactgagttgtttgttaaagatatgtccctagatcctccttatttagcagtcctgatgcagtatatataacatctgaacttatacacttgatataaaagggttaccatttttgagaaccacagagataggtagttcattactctcaaagtatagaaaatttaaatatacttcaagcaagagacaagaatcatggaaaaatggttacatttctgtaggagataaacatacataatatgttaaaattattttctatatttctggagttaggcgggccccagtgattaaggtagtttaagtgtgcttgttacattaagaaggaaatttatctttggtgcactagtgtattttacttatgtgcttgactgtaagaccatctttcaaaagcaaggtttaattaagagattattgcaagcctgagttttgatatattagtcagatataaatcacatcataggaagatattattataatattataatagctctcttagaatggaggaaattttactatacagtgtacttgcccaagtcaggatctaaacccaggtatctctacatccctagagctcaaattctttttattaatatataatgtctctttagaatacacctgcctctttagaatacaattttcttgtaaaaattgttcgctgattttgtcctgttttgtcatcagctgatcccccttgttcatacagtagcatcttatttactatagattcatttcttagatgatacccttccttttgacctctaataggattagagttaactttaatcctattcccttttctacccttttgacaccttttcctacttctataatatttattgactgacagaaaatgttaatcatagcagtatgaaaagtaggatacatgttgatatcatatttcttacctaaaatagcattatgtattatacaaacatatagaaattattataataatttactgtctatatacatcatccataccttgtttaatttaatcttcacagcaaattgtcctataagaataccatttaacatgcaaaggtttgaagttcttttggaggtactagatattctacccaaatgttttatacatattatttttgtgtttgcaaacttctaggacagtattatcatcccctttttccagatgaaaatactaaggttcagaaaaattaaatacttttcccaggagttaaaagccagtaggtgacagatacagaggattctgtgtaactccaaaatcatttctaccacactgagagaaaaaaatgcctaggtatgattattttttgtgaccccaattaaatgagaaaaacttagcagcggtatctttacaaagatgctttgactcatgagtttgcctcagaatagctcaagagcacgaaagtcaggcaacagcatgttaggcagtgtctactatgggcaatgagacatacagcattttagcctaactagaataaaaataaatgcattggtttttagcagtggattacatgtagtgaaggaaaagcactccataaatcagaaatgaattcagggcatattacctaggagtgattgcagactgacaagacatctcatgggaggagaggctgttgataaggcaagattattttcaagactgtcttttcctatagaaagtaattcccaggacaaaaacttccatccaagaaatctgactttgattgtttatctgcagtatgacttactgagcaaatattattaaaaggttattcatacttcagattgcttttcactatcacaagactacattgtctgaactttacacactttgattcaacaaaagttttgaatcatgctgttatggcttcaacttttactgaaacttctgtagaactaataagagttggattggaaaaattaaatttaactttttccttgaactggcatgcatgcttgttgtaaatttttaaaaatataccattataacaaccatagattggttttaatctaggggctgggcaaacatcactgtagcgtagtggctaaagatacacttaaatctagcctttctgcataggatccatgtgactgagcactacttgctgaatctttctgcacctcaattttttttaacctgttaagtgtgataacagcacctatcttataagggtctcttgagaattgtttggcatataaagcaccaagaagagtatctggagcatagaagcatcccaaaaagatgagctattattcacagtaccagtgccaaagcttgaatccgactctgtctaattcaaaagccctggccttcagctgcccaatgcactgcttctagaggggaggttaagtttgtatccattactaatacaaatgcatatatatatatatatatgtatgtatatgtatatacaatacatacataagcatatatgtatgtgtatatatacaacagtcccaaattttataaagaaatttgagaaacaacaaaagtttcacaaggggaaatatattttctgttgtacttagcataatgtttatttataagtagattgtatcatgcaaaaaaatttcataaacccacttacttcaatttctggtaacttctcttctttattatggtaaaactcctcaaacttgtattacacccattatatacatttcttctccttcaattctctccgtatccattcattaggtttctttctcaaatgccctgcctgaactgctcttattaaagtaaacaatgaccttcatatggttaaatcccatgcctaattctctcctctcatcttgctagacatatgggtgttattagacacaatcgcctttgccagaagtattccagggccaaattcttgaaactcttctccttcctccttatagcctctcctttggtcataagatccaacataatggttttaattacattctatatacagactcttttctgaatttatgtctcaacccagaacctatgcatgaaccccagattcctgtaaccaagtgtctactcattgagtagaaactcatcctcttattagtacagaaaaaggaaagttaaaaaaaaattaagccttgctattatccttggctcaggttctctcataccttacattatcattgcctgccaacttctgcagtggcttcctacctggtgtccctggtcccacctccaggtactggtcagagagtaataaatatcattgtcataaaccctgacctcttgaaacatgtatttcattgacatataagattcatactcactctgcaattacacaaagtaatggaataggaggtaaaagtcagcaaagaggatattttgagaaagccatcttggtttgaaagttcttaatttataatagctagaaaaataagaagacttcaatttgtagaatcacttgcatttttccaagtgagaagttagaacacctctctagatatgttggtttctcttgaatggactagtttttgagattattataaaattatctgttattttgacattatgcttataccattaacattaatacagtgtgcccatttaaataagtattactttaaatctaaggcactcttgaaatttaaaaaaaaaaaagatgtttaactatatgttcttttttttatttttcctaattaatcaacttatttaacaaacagtaaaggaagaaagtcattagattatcacaaatggcaagcactaagaacgtacttctttccttaacccttaaggtgaagtcttcagaaattatgtttaagcaatatgaatcatagttagtttaatgagtcatttattcctgcaattaggtggagaggaaaagcagaaagaaaggagtcatttaaaggtcattatttaccaacttttcatttttcagtatagcctcacacacacccacatccgacccttatctaccttagagttcttctatcagtagaaattatttgtaatcagaagtagctcagcctgattcatcaaaaaggaagggattgcaataatttttaaaaggagatttcagagtttatgctgtcaatctcccagcatcagcttcttctaaatagtctccagctatttgtaatactttactcatagcttttggacatgcatttgttatcaaaggcagagtaaaacttgcttcctggggcctatttttccttgccagcatcacagtcttacaccacacagttatgaatatattcttcctcagttatacttttatttatgtcctctagacattctgggtaattatgctggaaggaaccagaaaaaaaaaaagactattacaagtatcatgtacaaaacataaaagtaaatccacacaagataatgtgttttatataccctgttatagatacagtgggaatcaacttcactcacagcaactttggattggcttttcatctttatttggtggcaatttgtaataataaagcaacagaatgtcttcatgtattttatcattctatctcttaattgaaacatttctgctattttatttttaaataagccagaatggaaggcattgtagtaatactttttcagttatgtaaaaagaaagcactttaaccacagcagatatagcattcttagtactgtgaattagtaatcgttttaaaatatgtaaatcatattgtattttattggtgggttattcttttgttgttgcccttagtacagtagtaaacttcttgaattattgttcaaccctttggagatattgaataaatgtacatattcttctaggcattcatttagttgccagtctgaaaatattgtttgaaaaggtaagtaagaaaacggtcaaagatgccgaaagagagaggcgtcagtacctggggacacatgcaccttctgtgtacctttcctcacctgtgggctgactgctgtgtgtttaatcaagagggcaactcacatatagaaaagtaaatattcacagtgaatacagtagtcccttcacagtagaaaagggttagattcatgaaccctcagtgaaaggtaattaattagtggttttgaaataagactttttcatgtaacaatggttacaactgaacctaatacaacttaacgaccagaagaaactcttcgagatctcactcccttctggttcttattttgtttcattctagatattgtgaatactagaatgactgtgggcggctatgcttggttttccttcaagatattcaatgacttctaatttcatgacttagtggacttggtcttttttttaaatatatgatccatatgtctctgagtgctacagagacagaaatggtttttataaaatgttattttagtcatttggcagagggaaatcagtatcaaataatacctcctctcagaatcactgggttacatataaactgtctgccaacaataacagagaaacaagtgagttagtccctttcaaatattaggcttctttctctctcctacaacatgcaagagttcagctttataatctaggttcatttcctttttgttctttctcaatgctttttgcatattgagaaagttttcaaacaaaaattcatgtaatctagaatcagttgtagaaatttttaagataggtgcactaaactcagaaaactagtcaaatggtgtattgtaattaaaggcatcagattaacttttcttacatttagtcatgtttttaatctagattttttaagtctgatttagagagacatgtagacaggttgaattttcaaaaatacttagctttattggcaatgtagcttattcttctctcatctgattttgatttacaagaacattctttccttagagtgggatataaaacagattcatcatgaaattgtacttccctgtaaggctttctgtcacctcactatgacaatgtgtgaggcaggacatttccatatggttaagatgattgtcacccatctttctattcacaaactttttccctccttaagcctctcatacaggttccttcatctttagctctaagttctctgcttctctctcttgtatggggtgctcttcaaagtgaagacaaaaacaactgggatctgtttcctgctacaactcattattattctcatgtttgaacctctatcttaattcgcagttgtaattcttgtgaaattattttgtcaaactatacggtttgaagctaaattcaaaccaatgtggcaatttctgatttaaaagtttgccatatttagttttatgagactagatatgcacctaaaaatactatgtttaaactttttgttttgggaacatttcagatttacaagaaaaagttgtcaaaataattcataatttgaattacccttcccccagctttccctaatgtttacattttatataaccatattgaaattatcaaaacaggatattaaaataagcacagtgcaactaactaaaccacagatattgtttagattataccagtatttctgctaatcctttggtttcctgcttgatatggtttggatctgtgtccccaccaaatctcatgtagaactgtaattcccggtattgaaggtggggcctggtgggaggtgattggatagtgggggctgtttctcatgaatggtttagtactattcccttggtgctgttctcatgagagtgagttcttgcaagatctggttgcttaaaagtgtgtagcacctcccacttggctctctcattttccttcactggctgtatgatgtgctggctgcccctttgccctcctccatgattgtaagtttcctgaggcctcccaagaagctgagcccatgccaggatcatgcttcctgttcctgtggaactgtgggtcaattagacctcttttctttataaattacccagcctcagatatttctttatagcaatgtgagaatgaactaatacactgctcccaggagctagtggccattgggaacacttttaggcttaatcttacttttgacatttctttcttttctcttttctttgtgttttttttgggggggaaggggacggggggaagcttttccttacttacagctacaagatgcattaatctaatcttgtattttttcttattccagccctagaattaaccacttctccaaaacgccctgattccttccattgaagaccgatatttaaaaccaagatctggatactagttatactcattgctactggggtatcactgtttatatgccctcttaagagtacagagcaaaaaatatgtgtgtatactaacccatttatctgcacacatctatatttacttttgtacatgtgtatgcatatatgtttgcatgtatgcatgtctccatctaccttcctacttatcgatttctctgtctctatccatacatctatctaccatctatcttcatactaatacctccaatctaatcaacaacaccgttctaaccttcaccattatttgttacttctttctcagacagtgaaaactaagactatcaatatctgaaacctgtttgcttatttgtttaaccctaccatacatgtagtttaaaacttgctaagccattactctgtgagaaacaactttaccaagaggagtacattgtttggattatttttatttttagctttacagttcagtcaaaacactattttctaaagttacttagggcacatcccctctctccactgagcttattgtggttatgagatttatttgttatataaatagataaatttgctacaaactgcattttctgttgggttttccatacatctttgttgattttgttaaacttacatttaacaaaatgtgctttttgtggtatacaattttatgatttaagtcatgtatccaatgccacatttccttatagaagacttccattatccaaaaattccaccacactgcctgcctgtagtcagctaccgaccccaaactccaaactctggcaaatattgcactgtttgctgctgctatagtttcaccttctccagaatgtcatgggaacagagtcataaactattgaaccttttggacatggcttcctccgcttagtagaaacatttaaccctaattcatattgtattaatcattagttctgccattttattgctgagtcactgtctcttgtatggatgtaccacaatttgtttatctgttcacagtttgaatggataaactgtgaatggatgaactgtgggttgtttcaggatttagtgattataaataaagctgctctaaacatatcaagttaaagtttttgagtgcagttatgtttccatttcttttgcgtaaacacttagaagcaagattgctaggtcatatggtaacagtacgtttagctttagaaaaaactggcaaactgttttcccaaagtgactatacaattttgcattctcaccagcaatatattacagtagaatatcattgtagttttactttgaatttctttatgggtaatgatattgatcatatcttcatgtgctcatttactataccgtcattgtgaatgtgtttgtttaaaatacttccctatttttatatcattttctttgtttatttatattgtcctatacatattctggattaaacgttttatgaaaatgtaacttacacacctttcctttctttctgtggattgtcttttcagtcctttaacagtgcttttcaccaagcaaaagttttcagttttgacaaagtctaatttattttttcattatggatcatatttttgttgtcatttctaaaaattctttcacttacccaagtcatgtagattttttcttatatttttcttctagaagttttatagacttacatttctattaaggtctatgacaaattttgaatcaatttttgtataaggcatgaagtataggtcaagcttatttttttatatgaatctccaatttttatagtaccatttcttgggaaaactgttttttctctatcaaattgttttcactactttgtcaaaagttacttgtctgcatttatgtgagtctagattctttattctgtccaatcgagctatacttcaatattgttacctaatagcagagtttcattagtactacgacttaataataataattcttaaaatcagttagcattactcctacaattttggagtttcttttcaaaattgtttcagctattctaggtattctgcatttccacaaatatttttgaataaaattgtcaacatcgacacaaaattctgccaggatttcgactgggattttgttgaaaatgtaggccaatttaaggagacttggcatcttaacaatattaagttttctagccatgaaaatggtacatatctttatttatttatctttttaaataactgtcagaagtattctgtttcttctattccaatatgtataatgcttatttcttttaattttcttattgcattgcctaagatttttcggtatggtattgaagtaatggaaaataacattcttgctttcttcctagtctagagcagactggggcgctggaaagggaggtgaagcattcaatatttcacctttaattttagatgtagggtttttgtagatgtcttttaccaaattaatgaagttgctttgtcttttaaatttgcttagtttttaacatgaatagatgctatacttgtcaagtgttttttctgcatcatgttttgatggccatataagttttatttcttaaattgttaataaggtgaattaaacagattgatttttgaatgttgtgccagtcctgcattattgggataaacacaactaagttgtactacatcctcctttttatatattagtacattgaattttcttgtattatgttgggcatatttgcatttatgttcataagggttactatcctacaattttcttttcttgtaatgttgatttggttttggtattagtataatctagattcataaaatgagtcagaaagtgttctcttctattttctagaaaaaaatttggtagaattgatattatttcttccttaaatggttggcagaaatatccagtaaaaccatgtaagctggagattttcttgctgaaaggtttctaaatacaaattcaattttctcaatagatatgaggcaatttaagttaactgcttttcttgaatgagtttgggtaattttagtctgtcaagaaatttaaattgaatatatatgggcattgaatcattcatagcattccttttggtaggaatgttgtcatctatttttatgtttatagtttgtatcttagtttttctttgtaaattggctacagttctatcaatttcattgttgtccaaataataactttacttcattttatttatttttctctttttaattttattgattttactcttgtctttattacctcctacctcctgcttgcattgcatgtaaatttctattatttctctaatttcttgtggtgaaaacttaaattttatttcgttctaatatatttatatttaatgttataaatttacctttaggcactgaaacatatgagtattaaaagtggcagacttgtgtgataaatgtagatgagtgaatttgtttcttctcttgttttgatcagcaaaggtccatgtggtcttgaaagcttttgggatctgtagatttgggcacttttttttttaacttttattttgagttcaggagtacatgtgcaggtttgttatacaggtaaactcgtgtcatgggagttcattgtacagattactttgtgactcaggtattaagcctattacccctgagttatttttcctgactctctccattctcccacccacctccctccagtatgccccagtttctgttgttcccttctatatgtccatgtgttctcattatttagctcccacttataaatgagaacatgtgatatttgtttttctcttcctgtggtagtttgctaagcataatggcctccagctccatccatgtttctgcaaagcacacaatttcattcttctttatggctgtgtagtattccatgttgtatatgtgccacattttctttatccagtctaccattgataagcatttagattgattccatgtctttgctattgtgaatagtgctatagtgaacataaacatgcatttgtctttatggtaaaatggtttatattcctttgggtatatacccagtagtgagattgctgggtcaaataatagttctgttttcagctccttcaggaatcaccacattgttttccacaatggttgaactaatttacactcccaccaacagtatataagcattcctttttctctataagctcaacagcatttgttattttttgactttttattaacagccattctgattggtgtgagatgatatcttattgtggttttcatttgcatttgtctaataatcagtgataagctttttttcatatgcttcttagccacatatatgtcttctttttaaaagtatctgttcatgtcctttgcccactttttggagtgtttcacacatactccaaacatggagttgtttgttttttctttgtagatatgtttaagttgcttataaatgctggatgtttgacctttgtcagctgcatagtttgcaaaagtttctcccattctgtaggttgtttactatgttgacagcttcttttgttgtaatttattagatcccatttgtcaatttttgcctttgttgcaattgttgttggtatctttgtcatgaaatctttgtccattcctattacttgggtacttttcaatgcaaacaattttaggtcaacaataagtataaacaattttggctcaatgatattttaaaaacatttattatgaatttctatagtataatgtgtgggaaatggataaaatgtggattgtggacctgtaaaaatcttaaagttttaattttacaactcaattaagctaggcatttctaattttatatcagtgtgattcttgaaaacaatatagtgttccatggaactcttggaagaaaaaccaaaacctgtgtgatattccagacaggtgctaaagaagagaaatagaatgaatgataattactattaattgaaatacatatctcattaatcttcatagtaactgaaacttgcaaaacgtctacaacttttactttacaaggtgtgaagtaggggagttaaaataatttaccactttgtacagcaaggaacaaagatgatttaaaatcaagtctgctttactgccttactttagtgagatatctatgtctgttatcacaagggaaatggaaaggaggttgtaacattttctggctgtgctttattttttacaatgtccagagaaagtaattatcagatgttttctggttacatgatacatgatttttgctccagtttgtcacttacttgatagatgtatgcttctttttatgcccttctcttcccaatcagaaaaaagaaagttaaatcatataggataaaatgcattacatataaaagttcctgatatttttagatgtgtttcccatgagatgcctcaaagatggaggcatttaaattagtggcaaaaagtatggagggcctcatggagttcttaggaatactatcccccacattgcaggttagttgagagcctcttcaaaagaccaacgtatcctgtaaaattatcacattagaattccttttatatggattccattggcagtaatataagcagaccaataaaaaagaaaaaaatatggatttacttgattacaaaactgttaaataattctttgaggataaaatagatttagaccaagaatgtcaataaaagggggcaacagagtaaaggaaacaaagagtttcagtggagaataggagcaatttaagtgtttagagattttttagtgaatatctctctgacattgctaatttcactttccaattatataaagtgatgagaaattgttgtatttatcctttacctaaaatatatttttgaacaactctgaaatgtttttatcagatagtttaattaattaaactaaggataattactggtggcaaaaaccatatgcctttatttcattcttaaattgttcatttaaactcactaggactagttttccataggtcctatattagtaagtttaggctactataacaaaataccatagactgggtggctgaaataacagaaatttatttatcacagttctggaggctggaaagtccaagatcaaagtgtcagcaaattcggtgtctgcggagggccctcttcctggcttgcagatggccactttcttgctgtgtctttacacaggggacagagactcaaatttttctcataaagatactaatcccatcataggatccccattctcatgacctcatctacatttaatttcccaaaggcctcatctccaaataccattatattggggggtagggcttgaacatattaattttgggggacatgaacatccagtccatttaagtaccattacttttctgttactcttaggcaattaaatattcataagttacttgcactcacaaaaatttatagaaatttaaaatgtctaatcttgtgtcaaggtaaaaatcattcccctttttagaccatatagggtaacttcttgatgttgccatggcatttgtaaactgtgatggcactggtgagagtgtcttttaacatgttaatgtattataactagagtataatgagcagtgaggacgaccaggggtcactctcattgccatcttaattttggtgggttttagccggcttctttactgcaaccccttgtattagcaaggtctttatgacctatatcttgtgctgacctcctatctcatcctgtgacttagaatgcctaactgtctgggaatgcaggccagtaggtctcagccttattttacccaacccctactcaagatggagttgctctttttgaaacacttctgacatttggtgtcatttagctggtattatagtcatttagcactgatacactatggccttcaaagatgtttctttgggaccattataggtttttaggatatttctcatggcaaacaatcttctcttgccatcttcttatcaatctgctccctcttagagttcctgtcattccttctaaaggagaatttggagccagatccctttaaaatggtttatgccaactcctcctactttgtagcacttatgtagtctgtggcaaagtctcacatcttatgtcccaataaactctgggagcgcaacaaattattggaattcagatatccgttgtgaagccaccctctcacttaaaatagctatgtagccacgcaatctgagctttagacatttctcaatgtgcacctaaggtgttccccaaatatggtacacatttcaagttctctgggtggtctcctttatgctgacatcaccacccttcacctcattccccatggcaggacaaggaggtctcagagaacactatcacctctacccaaataaatcccctttataacctcatctaggttggtaagtggctatgaataacaacactgatttttagaattttctttgcaaacctggtctagggaatctgttcttcactttggaatgtgaatgctcttggcagctattattttcccatcaggttacagcctcagtgaaaactgaattataaagggaccaattttaaaatcttgttatggtgctacatgaactctttgatgtttcccacattttttttctgctatgtacccatcagatgagaatttctaccaaccctcactttccagaaagaagatcaatgtatgtttggtgcagagcaacccataactgatttctgttcaacataccatatttattcagcaaaaattttcagtttaatataaaacacagtatgaattttaatggattttagtctcctaggcatatgtgctcaagtttttttaaattatcaaaattctcttactccttctatctttgtagctattacattttttaaatgaagaaaatcgatatcaaatactccaaatgcaatttatatcagaaaattgatttggacttaagtacatgttaggaaaatattaggtacattaccaataattcaaagtataaaataaatcaccaagttagtattattttttaaaataaaatgataaaatttcattccctctttaggcaagtgactttaccatttcctgaatctgtcattgagtggtttggcaaagagctgacagatgaatctgaagatctttttaaaaaataactgcagactccttaccatataatttcatgataatcaatatttgctgaatcatctttttcttacctatataaaatcataacaaaatatacattcaatgtctttataaaactaggtactcctgagaaattaaaaattacctttaaatatattttaaaagcattttagctatagtcagctaagctatctaagttatctcacttagtttacactccttactataatgcatcaataaacttcatgttaggccgggcacggtggctcacgccagtaatcccagcacttcgggaggccgagacgggcagatcacgaggtcaggagatcgagaccatcctggcgaagacggtgaaaccccgtctctactaaaaatacaaaagaattagccagacgtggtggcgggtgcctgtaatctcagctactcaagaggctgaggcaggagaatggcatgaacccggaagttggagcttgcagtgagccgggatagttagccactgcactccagcctgggcgacagagcgagactccttctcaaaaaataataataattttaaaaaataaaaataaataaactccatgttagaagtagaaacctgttaaccaactgatagaaaaccaatcaagataaaatgtgctccttttgtctccttcatcccctggtttagttatagctagatgtatagttaatgttcataaagaaaactagtaatgaaatgccttccacccatattaacgatgctacaacatttttatttgtgttaattcttttttttttttttttgagattggtacatcttatttcattgactagaatagaaatgctgtgtagggcattcatttaaaatagtttaaggtaaaaattaccctaaacaaactggctgttatttctaactctgtaatatatattatttgtctatcaaggttaatttcaaaattctaaaacttttgtttccattgaaattctttcatatagaagtctagaagttctttagtatatagttaaacaacttatttatggattgcccaggccaggttttgtctagctgcaaactggctttactttaaaatcacatactcttgcttaagtaagtattaaggaaaggaagaaagaaaaaaacaacaaaaccaaccagagccatgcattattttaaaggtaaaaatctgctgggaatagaatttcgtgatactttcaatgatagtctatcagtgtacaaaaaggaggaaagtaaaaggtaatctaaaggaccattctttttctcattaacatctcaagaacatacagttctctagataataatatcactggtctctgctactgaaagctaaagaacttttaatctccaggaatctgtttctgtttgtgaaatagatgactgtgctttgtgagtgctgattactaacctatctaaaaacatcaaatgagattaaagttgctgaaattttagaatcaccattcatctaaggtttgtaataccattttgtagaaattgttctaataaatctacagaattcagtccttcacacattaaatgtcagcataatctctgttttaagtgtgagattcaggagtgcatgcattccttgagggtgagcaaacacttagatcctatgttaaatttgctttatgtttaacccttcaaaaatcttaaattactatatgttttatcctttctagattaatttatgtgtactaggccttttaaccactttatgtgacatgaaaaacataaaataagccttaatttttcaaaatgtgagaataataatcaaaaaaagagtagaaaagcataaaattgacagggaagatacactataaaagcagtagtttaaatccataacactttacagaggacacaacattcaaggcacctattccaggctgccaattagtaagccactggccttgtataaatactgtcattttttcatatataatatagaaataggaacacttaccttgcctgatacactcgtgttaatatcaaataagataaagaatatggaggtgctatttaaactgcacagtagctattcaaatagtataatgcctccttcatctctagaatgtcatgctttgcaaaatatacttatcactattttatttggggcacagatatgttcactgaatttaaatattatttcagttctttttaaataatatagtactgatcaataaaaagcatgtaatgacatcttattattaattaaactatttacaaggagggctgagtagtattttcagatctgctccttgacatttatcttcaagataagcacaatagacttcaagaaatatcctattagtggtatattatgaaaaagaaaagccaggctgtgggcagtggctcacatctgtactcctagcacactctgggaggccaaggcaggcggatcacttgaggccagcagttcaacaccagcctggccaacatggagaaaccccatctctactaaaaacacacaaaaattagccgggcgtggtggcattcacttgtagtcccggctactcaggaggctgaggcaggagaattccttaaacctgggaggcagaggctgcagtgagccgagatcgtaccactgcactccagagcctctgcagcagagcaagactctgtctggggtggcgggctggggggaaggcaacaacaaaagaaaagccagattacaaaaaaaaatatgtaaatgtgacttcattatttcatttagaaacaaacaccttatgactatatgtaaagatgtgaaaagtacaagaagagcacttggcggactattttctcttttggttgctattaaaatatttaacgataatttgtagacaatgagatcataaatgatttttcttaactttttatgtcagagttttttcataaccaaatttaatacattaattatatattaattttctaatgactaaaaaatattcccatctgtatttctccttcatatggaagactagtctagcaatcaagagcatagcctttggaatcagacagattggggtttcaatataggctccatacttcactagccatatgacctagcaacagaaatgaatctccctgccggcatggtggctcatgcctgtaatcccagcattttgcaaggccagggtgggcggatcatttgaagtcaggagttcaagaccagcctgaccagcatgatgaaatcctgtctctactaaaaatacaaaaaaattagccaggtgtggtggcacgtgcttgtagtcccagcaagtcaggagtctgaagcaggagaatcgctttaatttgggaggcaaaggttgcagtgagccaagatcatgccactgtactccagcctgggtgacagagggagactccatcggaaaaaaaaaagaaagaaaaaaaagaaagaaatcagtctctctgaatctgtttcttcaactttagtaataggaccaatcccatttgtttgtatatttgatggcttaatgcctgagagttaaatatgctgtcttagttcattgtgtgctgctataacacaatatttaaaactgtgtaatttataaagagcaggaatttatgttctcacggttctggaggctggaaagtccaagatcaaggtgctctcacttggtctggtgagagcccagtctctgctttcatctcacttggtctggtgagagcccagtctctgctttcatctcacttggtctggtgagagcccagtctctgctttcatctcacttggtctggtgagagcccagtctctgctttcatctcacttggtctggtgagagcccagtctctgctttcatctcacttggtctggtgagagtccagtctgcttccacaatggtgccttgaactttgtgtcctctctaaaggaaaagtgctgtgttctcaagtaacagaaggtggaggaactcctttcatcaagcccttgtataaaagtacataatcccatttattaggacagagctgtcatggcctcatcacctcccagaggctccaccttctgatcccatcaacttgataattaggttttattatagatattggaaaagacaccacattcaaaccatagtacagggtaatataaattatttagcactattcttgatatataattgaaaactcagtgtgttgactatgatttttgaacacttattcatggtgttgaattacttcttttcttccctttgcttttttacatttattcagctttcatttggttggaattactctttaatattatgcttggaaaagttatgtaggtggcattttaccttttgcctttcctttaaattatagttttgctggttttaaagcttttcagtttataacctttctctctggattctggaagggctgatcaattggcttcttgtatttaattttgcagaagagaatgctaagggcaatttggttatttcttttgtaaataacctaaataggtctaaatattatgtttcaaatgttaatcttgttttttccattaatattatccaacattaggtaatctcttttcatttaaggacttgattctttcattacctacatttgtttatgttttatttattcttgttttttctttcattgctctgctatcttccagatgtgtgtctatacatatattttatttatttattttttagacagagtcttgctctgttgcccaggctggagtgcagtggtgcagtcttggctcactgccacctccacctcccaggttcaagcaattctcccgactcagcctcaggaaataaagattaacaattatcttactcatttgaaactctatgttttcatgtcatttgactaattagtttaaggaacatgcagccagcacatgtatagtgtcccctcttgtttttttagcaatttttaaaacttttattttaagtacaatgacataactgcagggtttgttacaaaggtaaacttgtgtcatggaagtctattgtacctaatagttgtttttcctgatcatatccctcctcccaaaatccaccctctgaaaggatccaatgtgtgctgttctccctctatgtgtccatgtgttctcatcatttagcttccacttgtaagtaagaacatgcaatatttggttttctgttcctgtgttaatttgctaaggataatggcctcaagctccaaccatgtgcctgccgaagacacgatctcatttatttttatggctgcatagtattccacggtgtgtatgtaccacattttctattttttgttattttcttttattttttttgagacagggtcttactttgtagactaggctggagtgcagtgatacaatctcagctcaccacaacctctgcctccagggctcaaaaatcctcccatctcagcctcccaagtagctgggaccacaagcatataccaccatgcccagctaattttgtatggagatacggttttgccatgttgcctgctcaggctggtctggaactcctgggctgaagcaatctacctgcctcagattcccagagtgctgggatttcagacatgagtcactgtgcccagcctctgtaccttgttttatttatctagtctatcactggtgggcatttaggctgattccatcttgatgctgaataaccctatcatggggaaaaccctgataccttcactcccccaaaataccaccaactaaaatctattccaactcacctctattgaaagttcatgacaacagatgggtttacacaggggttgtgcaaataacttgaaatcaaatattagacattctgttcttaataaatttcagcaacccagacaatgggaatttctttttgggtgtctttcttactgcctttccatccctccctacaatacacacgcacacacacacacacacacacacacacacacacacacacactcccctctttctttttgaactgacgtaaaaataagagctcatccttttagaattttgtttttacttgtagggtcctttgaaaatggaaacgtttttgttcacataagtgaaaaaaaagtcttaatagtatatgttattttattttacacaaattacagctataatggaaagggcactaaccgtgaagttaaatttggatttgaatgttggcttcatgagtcaatacctgtgtggctttaaacaacttactcagcctcatagtcttctcgtgtgtgaaataagattatcagtctcacaagactgctgaggtgattaccaaggaaacgcaggtgaagatgcctagagcatagcctgcttatgtgaataatgaatttttaaaaccactgggtaaataaaagatgtcactgtggtacatggatttttttatactttataaacattctctgagctcgcattacgtctaaggcactgccctagatgctttgaaaagcaagaaaaggaaggtacctgccctccggaagtttaaaatttagagataaagacaaatgcaaaaaaaatggaatgccatgtgtaatagagatgcaaagtgaataatagtaatacttggtaaaatctgtaaagacttcacataatatagttggagcatgaactaggtctcaaattttgagtgggatacaatccatatagacaaaacacgtgcagaaaaaaaaaatcttactttttgaatctaagaaatcactattaaacggtctattggcaagcatgagtaaaacccaaagactgaggctacagatatgaccagcttggagactttagacaaaatattccatttgtcttcttctgaatctatgcctctttgtgtaaattatatgtgcagtattcctctgagccaattttgttttgcatgagccagtaatgggccagtgaacatttatttcaagaaaaacagaagtatggtgtttattatagcatcctctgtagccagaataactaaataaaagaatgagtatctccagagatctcccccaccccccaaaaaataactagaagtttcagtaagctactgaatcagagaggcaaaaaggcactattttaatttttcatattttatttattattgtagaagaaatccaattaatatgcaatttgtttcaataactgagaaaaacatcccattatggaataaaggtagtattataaactggtgtcgtttttcatacaggatgactaccaaccagaactcagtaaggcaaatatttttccagaagtagggatgtgtttgagccaaatccactctcattttttaaatccatgttctttgtgacctaacagtgaagtttgattcattgaagccactaagtgatgaaacactatgaaatttactagcaattatttctccatttaattttatgaatttcctccagtttcactaatatcatcagcaaatttttcacacagacacacacacacactatgtggtgttattaacagctttattaatctgtatctcattagtcttagccttggctaattgtaaacatcaaatccatcataaaataataagtactcagccaggcacatgtggtcccagctacttaggaggctgaggtgggaagatcacttgagcctggttggttgaggatgcagtgagccatgattgcaccactgcactccagcctgggcaacagaaaaaaatcctgtctcaaaaatactaagaagaagaagaggtattcaaatatctctgaaagcaattctgaaatacttaccccaaagtgatatttgaacaactggaaaaagtgtgtgttctccaaaataactccttttaaaaatacaaccttaagattaaatacataaatatatgctgtatttgtctaatttttggcaggaacacatcacatcacttcatggtttcttataacactctttgcattaccagctgcatataccaactctttgtgaatagggactgaatcttccatgtgtagctctgccattgtacggtaagtcctcacctgatgtcatggataggttcttggaatctgcacctttaaggaaaacaatgtataacaaaatcaattttacccataggctagttgatatacgtaagagttatgttcctacatctctcatcacaaaaacatcaccgaagttctaaatagaccaaagacttccaatattaaaattgaaataaatgtgagctatacatacattgaagaaagattagtaaaaacaagataagtgtttaccaacttattccacttcagggttacaggtggcctcagagcctatcccagcagctcaggcacaaggtggcaactgaccttggccaggatgcctgtccaccacagggtgcactcatacaatactcactcactcactcactcactcactcactcactccctccctccctcacactgggaccatggggacaagcagatgaacctaatgcgcacatcaatggaatgtgggagaatacaggagtacttggagaaaacccacacagacataaagagaacatgcaaactccacacagtatcactgccggagattcttttttttttttttcctcatcaatttataaccaaacaatgttgatcaaaatgacgtaactagaggaccttctgtgtataaggattgaggactattgtaaaactctaaagaaacaagggggaaaaaaatgggcccttggcctaattagcatgggacagcaaagaaatgagctttcaaaagattaaatataaacataagcatttcctctttcagctgaaatgagtatggtgaatattgtgtaatgatcagtgtcacagcagtcccagccatgtcccaaccatgtattttctatttcagggaggaagctattgtaactctgcagggtctcactcactttgatttatgctgtgctctcagctcctgaaaaattctttagaacaacctgagaagtgactgtaatctgattgttctctgggagcagtagggattctatgatggcactagtagtgttctgtttttttctaatgagttctagtaatgaatggggagttggtacccaaactattgagaatctggctggtattttgctcaaaaagggtgtactctccttagaaaatatactctgtactctagaggatttctccttcagagccatttcatgatggggaagcagacttttagagatttgctttttaaaaatatgtgtgtatatatattttttaaccaagaagaaaacaattctgcaaacattgctgaaatgtgtaaagacaccttcatggtatatcctattttttacttggagaaagaaataatatcaagaagcaaaagttattattcatgtttttctgcatttttattaataaattttgtaactaattctaaagtatctggctaacagagaacaatatttgtgcatttaatcaaatgcacaaatatttgattatttaatcaaagatgacaaaaactcaactagctgaaaatatttcatatctatgcttgtttttatatttactcattatctacatgatttttatttagtgtgccttgatatatatttttcttcaacaatgtgtaagattctatctcataagtcttgttctcttcttagttctaagcatttactactatttagatttgtgatgaggaaatgaggctgaaaatgatatgacacagtgaaaaaggaactaatagtgtcagcccataaaactatctcaggaaatgaggtggaacctcatagagataacctcgttaagaggagtcagaaaaatgtacattgcacatccacataattggaaataggctgtgataggaaactaggaattaccaaaatgattgcagatgtccttgactcataaggctgattttcatttagcacaccttctcatatacaggtggagcaaagcaatcaattgtcatagaatcacagaatttttaattttcaattgagttctgagttcttccaaagcagccaccgtacaatgggaccatgtttatgctacatggtttataggtacctgcatttaatagcttagactgagctttgcagttcagctgtatatgtttcaaaaagtttagaaccatattaatatgtatgtctttggttaatatatgaaatattttgaaatattgttatacgctgcaaacaattgattagttacaagcccagccaaagtgctaggccttgaactttgagaaatagaaagtactacacaaagcatgatttctaattatggggtgcatgaaatttggttgtgtcccccaaacaaattatttcagtggtaagatagtgctggaaaataagtatatacataccaaattaactggtacaagaaattagggaaagaatttaagttttttggctcagtaccagataaatttggattcaagcttcttctttgccactaagttgctgtattgccacagtaagttccttacctttgctgtgtctcacttttttcatttacaaaacggggaataatatagctataatagcataggatagctttaaggatgaaatacaataccgagaaatacagttttgcaatacttggcactctgtaaatggcagctatttacagcaactcatgaaagattatttataagtttggtgacttaatggagatggggttttactggaacattgaaatatattatgaatttcataaatgtgaaactcataggaaaaaagtcaaaataggaagcctcgaacctagaaatagtaccagatgtgaaaacttgttaaataatttttatttaaagctggtttccaagaaatataaaatttccaagcaatgtttttccacctgttgcaatctagtcaagtgtaaaattttcacctcaagtaaaacatcactcataagcacatcttgggggaaaaatacttgttagcaaaattcatttaagaaaatattaacacttcaggaacaaaaaagcctgggtaaataactggttataagacttaactttattaatatatttctataaatttattggaatattgttggacaattgtggtcattatggtaatggtacagaatgtacatgtaataaattttgatgacatcgcaatgttaataaaatacctaacaacgttgacagggagaagagggaaattaggaagcaatgtgggaggttcaatatcctcatcttttacataatgtttgtatttgaatccatctaaaattgaaaaattgtttataagatataatgacttaatgttaatgtttttatttcttctcttaacctgaaagtgacactttaaaatgtcaatacttacagtgcttaaagtggatttgttaaaaatcagtacattttttcaacatcacttcattaattttttttcatttaatctaagtagtatttatcccaaattgcatttagtaaaagatatttcttgcttcatatccagatctaggacacagctactttggcccataaggaaaaattcatttggccgtctgcttaagtttttggcacttcattcaatatatttctgttactttaatataaaagtttttaaaaagcaattctatcttttaaaaatatttattctcctaatcatgttttcatttgatgtttataatttttaattctgagtagtgagactgagggtttctaaaaattatctgtagttttcttcattgtttacattctttgagtaaacatatgtcttttatactcaccaaaaaacacacacacacacattctaacaaggcatgaactgttttctatttttcacttgaagattagtcatttttcttcaaattccatggaattttgttagacttttatgatacaatgtatcatcttcttccttgaatccattgtgtatacgtatttaatttacaatagtaaaattatattacacatgttagccgtttattttaactttcttcaaaaagtaacatgacatttagttatttgaatctaggaaagttaaattctataaaattacaataagtgtaggctacaattttaatcaaaatgcacataatttttaaagtgaatagtttaattatcatttaataatatcaaagttaatctcaaaaatttgattaaaaacacattatcaaataattaaatgcttagagctaaaaattgagaacatttggtgcttattcaacaaaattccaagtttcattgttttagaatattaaaaatcgtgttttcatgtgttatagtatacaccaaaaatacttatttcccatatactctcaatttttttcattgaacatgttcttttcacagggaaacattccctttagtttttcagcttttttgtttgtttggttttgttgtttggttttgttttttgttttgtttttgtttttctgagacggagtctcactctgtctcccaggcgggagtgcagtggtgcagtctccactcacggcaacctccacctcctgggttcaagcaattctctgtctcagcctcccgagtagctgggattacaggcgcccaccaccacgcccggctacttttggtatttttcgtacagatggcgtttcaccatcctggccaggcatttcgtgaactcctgatcttgtgatccacccacctcgcctcccaaagtgctgggattactggcgtgagccaccgcccccggccagtttttcagctttttactcctccattttgaccttccgtgaatgagactcactctctcaaatccatatccattgaagtctcttcagatcagtggtgtcttaatattgtttctaaacctcctaatctcattagaaatataagggtaataagaggatggagaggaagtttccgactgagatcaggtggttagaaaatagttacctcttcctggattgtctagaaagtaatttacgttgaaactcgcacatacattttaagcccaatataatactctgtactatagaactaaattccacttgcgtgaattacaactactgagagagaatacctagaaccgaattcaatatatcatattgtattaggccgttcttacattgctttaaagaaatacctgagactgagtaatttataaggaaaagaggtttaattggctcacagttctgcaggctgtacaagcatggtgctggcatctcttggcttttggggaagcctcaggaagcatttattcacagcagaaggtgaagcaggaggttgcccgtcacatggcgaaaacaggagcaagagagatgactggcgggcaggttgtcacacacttttaaactactaaatctcgtgagaactcactcactattgtgaggacagcatcaagccatgaggtatccacccctatgaccccaacgcctcccattaggccccacctccaacactggagcccacatttcaacaggagatttggaggggacacatattcaaatcatatcacatatttagcgtcatttcaagttaattttgtgaaggaatttgtgtaatcaaaatcctgccagtctattgaaaactttgaaaagtcgaagtcagaaattatttcaaatcgaatacactactattaataaaattacactgcacaaaatctatggttttgagagcttatagcctagaagaagcaggaaaccacgtaggtttttgtgggggtctacacataagattgcctcaaataccctgagcatgcaatgtggagtccaaagccttcccagatttcttcaaactcctagcatgttatgctgccttgattctttcccccatgtgagctctatagctgtgcgttgttgaagaaatcagagctgagtagcagttaaaatggaaaaacaaaaaaaacccagactttatttaaaaactattgcaataggggaaaagagatttcagtattgaatagaactgagctcagttccaaatatatcatggataagtggggatttatattcaagggaggcagtctggaatgaaaaattactgagattaagcatcaagagtagagggttgattctggtttaatatacctaacaggaatcttgctgaaggcaggctggagtgaccagccatcacttgggggatgaggaatttgatcagacattgaggttcatcagatatcacatttaggacgttttctttaaactgacttagcaagattctcattacaattgagtgatgccaagactaacagagacccccaaatgtagatgtctagttgggaacaggattcacaggtgccgaactaaagtttgactaactaaaacttaaactgaagagagccattgtcagcatgttatttttttttcacccagacaaacctaaataactcattcttttccccaacttctataaaaaaaaatcacttataacaaccttttaacaaatgttaatgaaaaattgtgactagtaaggggaggtcacagagaggaattttgcctcattttccattcttgttccttgttaggtatcttcccaaattatttcctggagatccaaatccttcttcctttacttgcaagaacagttctatttccatatttgcacagccactcccattcaggtttactctcaagaaaactgaggaaaccctgttaataggacccattattctcagaaagccagtagaattagaaatggaaattttctgctgacgtgcaattgatgctgtagtagcatgtgctacagttccgtgcccaggataaaatagagggcaccatgttgggagtggacagtcctactaaaggcatcatgaatggctccatgtaaaagatgactctggagctaaagcttgaaagataacatcttgtatagacggtcgccatgatcataaggtgaagtcaagagatgggagttgaggaggaaatattcaaacagatggaacaaaatgaacaatgacacagaagttccttttagctggagtgtgtgactgtgagtcacggtgtaggaatagagaggctcaggagagagaaaataaaatatgaaactatccagggagtaaggaatcaggtcatgaagaatattgtatatctgttaaaatatttgagttgaatcccttgagtcatctattctgagtcacaggaatatgttacagcatgcattgaaaatgtttaatattgaagaaccaaagtctgactttttctatcctatgtgattcctgcattgcctatatgatactctcactcagttggattgcaatatacttttttgagtgggcaagaatgggatgtaattaaagctagcatactgggacatgttcataagcctagatgctcccaaggatgtttctttcttctgaaaaccatgtttcatgtgggccagagtacaaaacaaatattgagaagcattgttttgggcattaaggattttaagcatggaagggcaaataatatttgatcttttagaaggatcattttggtagacaaataggatctacttggcagcttatcagatataactcaaagaaaaattggcaaaggtctgtattaagtagtaacaacagaaattaaaagaaggcaaattacatgaaaactattgtgaggctaggaacgagggaatgggactgaagggctcgttaactgcggaagggtaaggaagacaatgtgctcagtaatccaccctttaatgttggctgtgtttaaagccattgaaaccactttggaagaactcttgggagacatgaggcagagggtgagaaatgcctgaagacctttaggagaatttagagcatttagttctgtccaaagtaaaatccaaggagcaacgctccaaagttaagtcaatgccatgttctgggtaaatgcctcatgaacggaaatcctaagatttctgtacaatttcctcttaggactcttaaagtctttaattaactagagatctagtatcaactgcactaaaactaagctacttcaaacatactgaattatccattgaaacccacactccagcaggtgtcttgttagtcaaactgtcaccctgcctagctgacatttcaaactcaaaaagtcttgaggcactcagattgtcaaggtgcatgtgactcaaaagccacatgagaaaaagtactcaaatgtgggaagcctagggatgttggatctggagggatgtggttttgtgaatcctggccacctaattggctatgaataagtgaaatatgatccatatattgatgtacctattgatatgagatagtaaaaataattttttcaacttcacgtgcaaaacaagtgttttctttcagtctgtactcagtctcaggcattaataaatttgaaatttttctgtcatttaaggatacctattcgcagaggtgggaagatggtttctagaactaaattttaaacatacaattactcatgctcttcagtatagtaagtttatgtggctgtttattctgtcttctaaaaggagagtattctttattcctttttcaaaacctaaattcttatgtaactagaagcaaagattatattttgattaccttgtggtaagaatttaaatagaaatgacagttattacaatttattttggcttagacaagttatactatttctaaatctggccactttcaaagaaatgaaaaaatcttaatacatacagatacacattatttctcactgtcacattgaaaaatgtacatttttttcaaaatttccaatttactctaaggccagaataaaaaaaaatcatgcatataaaaagggcattgttcgaaaggtataaattctggaaaactcctaaaacagtctctgactgtccaaggtaacttttcagggtaaactgccattattaggttaagttaaaatgtgtctcaaaaaaattagtagattaaattacatttagttaaccaagaaatctgtatttattgaaaacatgctgtttgcctcagttcaggtttacattatagctcaactggcattctaaattacccactcttgcaacttgtattgcttcttttttgtttcattctttacattgttataaagtgttaccactggaactcaaatcaaattgtatcactctcttacttagtaaccttgtggctaccacctccaactctatcttttgcatctcatatacaatcagctgtggaaacactgcagtcccacttcccagatcgcttattcattcatagatgtggttgggggaaatttacaccctcttatctaggaccagctcttccccccacaccttcttctccaaggtaattcttatgagtctgtctgatatatttatttctgttttgttttcctgatgcaaaacattaaatataataagtataatgattgaaagaatctgcataattcacagaataagaattccactaatttagttgtacttctaagaataaaaatatagacatatcacaatcatcatgttttttggtctacttcaaatagacaacttcatatttattaatcagtgaggtagaatccaaactgaattcaattcttagttttgagttcttagtccttcaaattccttttacaaatattttgatattagtatatttatattcatttagctagaaattatggtccagtcctgttctcattaattaattaacttaattaataggaatgtctgagttcatgtcagggcctagaagactcatctgctgtgggaaggcatgaattccccaatgtgtctgggcatactgacaacaaacagggagagctgcccttcttaataaagtttgattgacagctgtattgtgctgagtgtgattatatggtgcctagtcctgacgggttcagtccaaaataatgcaccatgtggatcacaagcctgctttaaatgttctaccattttataattgtcaagagagagaatttagatagaatgtcagtcaagtttttctgtttacctctgcagccatgagctttggttagataatctctgcgttatctatatcacctggatttttatgaagctcataatccaaattcaattatttttatgtttttctaatatgattttagggtcccttatacagaaaaaagctgtagtagcaggtaccatttctaattcatatgaatgaaacgaatcccaccaatatggtaccctttttcagtttctataaaataatctccattccttaaaaaaatacttactgtttgtcaagaagatatatattattaatttgattctcccatttttttactattggttttggtatcatagtctcttatttaaataatagatgcaaacacagtagagaccaacagataaaatgaactcaaccaaattttctctctgcaattgacacacaagtaaggcgtttgtttaacaggccttgtgtgtatgttttgtagtaatttaaacacacagaatatactttcattttcatttgtctggaaaacaatgttgaaacctttttttttttttttttttttttttttgcctcctgagtagctgggattacaggcgccacaacacccagttaattttttgtattttttgtagagagggggtttcatcatgttggccaggttggtcttcaactcctgacttcaggtgatccacccacctctgcctcccaaagtgcagagattacaggtatgagccactgtgcccggccacaatgttgaaacattaacatgaattattacaatcactttctcattgattttcccaccaggtgcaaggaaccatcttcccagctcccaatttcaatcccataatggatgcccaaatgctaggaggagcactccaaggatttggtaagtctgattatttctaccatcttttattgtgattattttttgctttaccttgttttaagactatactgtgggtataaaatagttgatgtcttacaaaacacagatacagattagacaaaaaaaaaaaaaactgagcaaagaagtagaatgagaagaaaaataatataaaaagacaataatgatgaacaaatttgcctttagaaattgctagtctaatcttaaaatgtttgccttaaatccataagtgcctcatcactaactactaaatgaaatctccactaaaacaccttaatccaggatagagcattctttttaacctttgcttctgttttctagcttgtttcatttgctatttgctatttccacttccagtcaatcaaactttttgctattcccccaaatgactctgcttttcacatctctgtaaattggcccaatcacttctctgcctggaatgttattttcttctcttgtctacttttcatctaaattctcttcttcaagaatctgttcagatgagccttcctctctgaatccttctttgggcactgcaagctcaatcagctatgccaaccccccaggcaccttacttcctacctctcactcccctaatctcatttgcactgtgcttatgtttgtctcacctgctgactggactgtgaactcccagagcttggagtttgacatagaggtgattcataatgaatgatactaaagtttagaaaaagtatatagagagagaagaagggaggacaattttgggattcttttacaaaaaaaaatattatatatataatttttaagatatcatatggaggtattaaactttcatatagtttcctacaataaaacctgttttaagaagactcttgatgagcataaagacaaacatagacaacataaaagaaatctttgcataaggcatgcaaaaactttcataagaaagcaagctcttaactttaaagacaaggtcgcctttacaggagcttgactgtgtgtgtgtatgcatgaatgcacatctgtgtgttttattcactagcagtatcccataggaaaacaatagaggacttaaaatatgctcgctaaagctgactttaggagtttgcaatgctttcatgccttttaaaatatcagtcatcactagaacaataaaaagacaagttaacacaaagttatgaattaactttttattgaggagtgcaatttttgctttaaaactatgggtcacagcaatctgttcaccaaaaagtttttctttgctccagtttcaatgttcctgtcattgcaattttagggtcagaataaggattcattttgaccatcataatttgttgcttatcagtgtattaggctgaagtacgtcaggaggttttgggctttgattgcacggtgtccactgtagcatgccagagcatgaacacagctcaaattgctttaaagttctatccatctccatgactctggcgaagtgttattgaaaaagacaataactaatgtttttcttagctactgtgttttatttagaaaaatctgaaagcaaaaacgtattctgaaacaaatgaaagtgagtagctctgatagaaattgctttaagttgtataaaaatttactcatcatctataaaaagaaacacttattagttaacattccctaatagtacagtctactttccaatttatcaccacttgaagatactttcctgcccatgcattcttataaccatttttattttgtatctattaacatgtgtaattgctaggtcagccctgtgagatcctggacaaccgaagtcatttttaacctacattcctaaatcttgacaaaggagaacacaagtcaaaattaatcttttttgaaatgctcagtgctattcagagtggacaatctcagcttgttcctgatctttctgatcattaagtatgatgctagctataggatttttgaaaacgttcattatgaagttaaggaagttcccctctattcttagtttgctaacagtttttaacttgaataggtattggattttgtcaagtgatttttcttcatctgttgatataatcacatgatttttctcctttttcctgttgatgcaatggatgacataactgatttttaaatggtgaaactgccttgcatatctggaataaatcccacttaatcatgaaatataatgccttgtatgcattattatatctgactttcaaactttttgaggatttttgcatctatctatgctcatgagaaatgttggtcagtaattttcttttcttgttgtgcctttctctggttttggtattagggtaaggctgacctagtagaaagagttatgaagcattctctatgcttctaatttctgaaggagattgtagaaaattgatatttctttcttaaaagtttggtagaattcataagtgaagccatatggacctagtgctttctattttgtgggttattaattaccaccgacttaagtttttgatagatatgggcccattcagattgtctatgagtttgggtaggttgtgtctttgaagaaattgatccatttcatctagactatcaaatttgtggtcttagagttattaataatattttattatgattttaatgtccattgagattggtagtaatggctcctgtttcgtttctgatattcgtaagttttatctctctctctctctgtctctgtctctctctccctctcttgctttctctctctttccttaacctagctaaagccctataaattttattgatgtttcccccaaaaaaaaccagcttttggtgccatggatgttttctcttgattttccaatttcaaattcattgattattgctctaatctttcttttcttctatttatgttaggtttaatttgctcttctttttccagtttcctaagatgcaagcttagattcttgatttcagatttctttttgtttctctatatgcatttttctctaagcattgcttttgctcatctcataaattttgagtcatatttttactttcaatttgtttgaaatttttaaaaattctcttgtcacttcttcttagtctcatgtgtatttagaagtgtgctgtttaatctgtgtgtatttggggatttttccagccatctttctgttactgatttctagtttaatttcattgcagcctcagagcatattttgtatgttttttattattttaaattgttaagatgtgttttgtggtcaagaatgtggtctattttggttaatgctccatgtaacttgagaagaatgtgtattctgcttttgtggcaataagcattctatagatgttaattaaatccagttgattgatggtgctgttcatttcaatgataccctcactggttttctgtctgctggatttttaaattacttatagagtaattgacaaattactctagaggtgttaaattgcccagttataacagtggattcttctatttctctttgcaattctattatttttttcctcatctcttttggcactctgttgtttggcacatacatattaaggtttgttatatcttcttggagaactgacccctttaacattttgtaataacccttttattcctgataattttctttgctttgaagtattctttgtctaaaattaacatagctactccaactttcttttgattgcatttgcatggtatataattcttcattctttacttttaatctctctgtgtctttaatgttgatttcttgtagaccacttagtgctattaagaaataattttactcacctcagttaaaatgagttttatccaaaagacagacaataacaaatgttggcaagaatgtggagaaaagagtacccttgtacattgtttctgggaatgtacgttagtaccaccactatgtggaacagtttaaaggttcctcaaaaaaattaaaaagtgagttataccatgtgatccagaaaatccactgctgggtatatacctaaaagaaaggaaatcaatatatcaaagacacatctgcattcttgtgtttgttccagcactatttacaatagctaagatttggaagcaacctgtgcatcaacagatgaatggataaggaaaatataatacaaatactcaacagagtacaattcgaccataaaaaagaatgagatcctgtcatttgcaacaacatggatgaaagtggagatcatatgttaagtgaaataagccaggcacagaaagacaaacattgcatgttctcacttatttacgagatctaaaaatcaaaacaatttaacacatggacataaaaaagtagaaggatgattaccagaggttgtgaagggtagcggagggctgctggggactcgaggatggttcatgggtacaaaaaatagttggaaagaatgaataaaacatactatttgatagcacaacagggtgactatagtcaataataactgtgtattttaaaatatctaaaactgtgtaattggattgtttgcaactcaatggataaatgcttaaggggatggataacccattcttcatgatgtgcttatttcatattgcatgcctatataaaaacatcttgtgtaccccataaatatatatacctattatgtaaccacaaaaattaaaagtaaaaaattaaggaataattttaaattttagtaataattatgttcttgcctaggaggccacttttacctatttgaccatacagtcgattctcattattcacaaatgctatatttacaaatttatctactcactaaaattgttttataacccccaaatcaatatgcacagatatttcgtggtcatttgcagacatgtgcagagaggtgaaaaattttagtcactagaatgcatattgctggttgaaatcaaacaaggtgacctctgccgtcttcttttagctttcatgctgtaaataagtcctttatgcaatctatgtagtgacacaattttgcatttttatgctttgcttggtgattgtgctgtttaaaatggccccaagcatagtgctgaagtactgcctagtgtgttcctacgcacaaaaagaagtattcaagaaaaaaatatgtgtgtcacataaactaaattcaagaattagttatagtactgttgaccatgagtttaatgttaatgaattaataaaataatacatccataaaaaataatagaaaatgtattgatctctgcacgatgctgtttggaaaatgctgaagtaacatctattctatgttatgaagtatggaaaagatgaaaaaatggctgaatttttgggttcttgagactataactgataacaaaattaataattttaaaaaataatcaaggcagtcagctttcttttgaaagcagtgttgggtggcaggttagaaaaattctgtagatcaggaggctacagaagagctttaaaaatatctcttaaatgtttatacaggagaaggctatctggaagtatagttttcaatgctaacaagactggcttgtttcataaggacattggcaaacaaacataatgcaaatgacatttcagttgacaaaaaatattgtaaccacagggttacagaaacctaaccctgcattttccctaggaacaatagttcagtatttactaattcagtgttcatggcaaatttgtagaatataaataccacatacaatgagtcacttgtacaaaataaaatttgataaaattatgatggttcattatgcccaaattttccattaaaatcagaaaaagataaattatttagaaatccctgacctaaagcactaggagaagaaggagaaaaacttataatgattacaaagaagaaatcaaagttgtgattatatgaagaagaggttatatatctagaaattcaagtttaataaaaagttacttaatattataagagagttcagtaacttctcaggatacaaagtaaacacaaaaatcagtatcacttcttcaattaagcaattatgtgttaggaaataaaacaaaaataacataactgggaatatcaatagaagtgcaaatataagtaactttagcaaaataaaccttcttgtcattagcaaaaagctccacaaatctttactaagtcttttagagaagaaaaatccttaaataataggttggcagaaatatcatgtaagtgacagaaagacaacacttacaaaattgattcctaaatttacagttattttaatttaaaaattgtaatacaattattgagattcatataaaatatctctggaagaataaataaacaagaattgctatgaaaacttaatagagcaattcagagcgctagattgtggataatctcaacagaacaagaacaaaaagtaagactataataatttcataaatgtgataatagtaagaataagacaaagaaagtaattttaaaatcttctatttattatcaaatatatgttcactttagaatgtccatcatgccattaacagattcctctactggttttgttttgttttgttttttgtttctgccttttagttcagggtcttaaccaggcttgagccagacatcatctttctctatgccttttcagtggagtctgccttttctctcagtagccattaatttctatctttgaagccaattctaggccttcctccctccctgttacagctttcagaccatttgtgcataaaataccctgatgctccccctgcttttcagtgatacagtcatctatgttaattcttaacacttgttctcatttgctggatatttcagcaccttattcatagccttcctgtgatcctaagcccatccaggagggacttaatttcaaaaaagatgatttgcttaacattctagcttttcaattcatttttctccttatctccattatatatcttcccttgttgaagaaaaattataccagatggaattaaacagcaaggaagattctgcagtagggatcaagactattgcaagaagggagagagagtgaactcaaatcctatgaaacaaaggcaagagagtttttaagcagtatggtgagatagtaggaaagaactaaaggatgttgggcagggagggcattggtcaatgtgattaggctatctgtgattgctaattggcacttaacaaagtcaggttcctgtcctcacacagacactgggaaataggaaatacagtttctatcttcccaatgatgacatttcaaaaggatggctcccatatccctgagaaagacaattttgggttgtcaaactgcaagaggctgggaggagacttacatctctaagaggcagagaaagaatttaaaattgcatgttttctaaaataaatgctctaataaaagggaggttaggagcctgtagttgggaagaaacttatctaaattttagtcaagctaagggaaaagttaatgtcatattgctgactctactatgactgcaaaattcatctaaactagttgtgcactaaaccaatctattagcttggtgtgttggcacatgaggaagtgaaggatacacagaccagaaacagtctatattagggaggagatagacagggtgataggtgttccatgaaaagcatgacaggttcactctatccctcagaagcacacagatgccttgtactttcatgatttccttctctattactcctccctccttaatatatgttcattataagccatatctctctattcaacaagaaagacacaatattagtcaattctcacactactataaagaactacctgagactacataatttataaagaaaagacatttaattggctcatggctttgcaggctgtacaggaagcatggctggggagacctcaggaaacttacaatcatggcagaaggcaaaggggaagcaggcacatcctacatggccttcctacaaggaggaagagaggaaaaggaattgcgacacacttttaaacaaccagatctcatgagaactcactcactatcagaagaccagcaagggggaaatctgcccccatgatccagtcacctcccaccaggcccctcctccaacactggggattagaattctacatgagctttgcaaagagacacaaatccaaaccatatgattctgcccctgtccccccacaaatctcatgttcttctcacattgcaaaatataattactgattctcaacagtctcctaagccttaactcatttcagcattaactcaagagtccacagtccaaagtctcatgtgagacaaggcaagtcctttctgcctatgagcctgtaaaatcaaaaacaagttagttacttccaatgtacaattggggtacaggtattggctaaatactctctttccaaaggggaaaaatcagccaaaacaaagggactagaggccctatgcaagcctgaaacttaacagggcagtcattgaatcttaaagttcccaaataatatccttcgactccatgtctcatatccaggccacactgatgcaagaggtgggctcccaaggcctcaggaagctccgcccccatggctctgcagagctcagtccccacggctactctcaagggctggtgttgactccctgtgcttttccaggtgcatggtgcaagatgtcagttcatctaccattctaggatctgaaggatggtggcccccttctcaaagctccactaggcagtgtcccagtgtgggggctccaaccccacatttttcccccacactgccttagtagaggttcctcatgaaggctctgcttctgcagcagatgtctgcttggacatccatgtgtttccatacatcctttaaaatctaggcaaaggctccaaaacctcaactcttgctgtccatgcactcacagacttaacaccatgtggaagccttggcaattttcagcttgcaccctctggagcagcagcctgggatatatctggggtccttttagccaaggctggagctggagcagctgggatgcagagagcagtgtcccacagttgtgcagggtagccaggcagggatctaaatccaaatatcagatgttgctcccatttaaacactaatcagcttaaaggtcaaggagccatttttttagtggagtaagagctgattgaagagacattatattttcttcactcccctgtacttttgattggatttttattttcctttcaatatttttttacaaatttaaggggtacgagtgcagatttgttgcatgcatatattgcatacttgtggagtctgtgcttttagtgtacccatcacctgaatagtgaacatcatacccaataggtaattttttaacccttgcccctcttccaccctctcactgtttggagtctctaatatctattatcctactcaatatgtccatgtgtacccttcgtttagctcccacccatcagtgagaacatatggtacttgacattttctgagttatttcacttaggataatggcctctgattctatctatgttgctgcaaaagacaagatttcattcttttttatagctgagtagtattccatggttccatggtgtgtatatgccacattttctttatccaatcatctgttgatagacacttaggttgattacatatcttggctattatgaatggtaatgcaataaacatatagatgcaaatatcttttttatataatgattactttccctttgagtatgtacacacagtagtgaaatttctgagtcaaatgatagttctatttttagttctttgagaaatcttcatactgtttcccacaaagatcatactaatttacatttccaccaacagtctttaagcattcctttttttgcacatcctctccaacatctgttattttaactttttttttttttttttcttgagatggagtcttactctgttgcccaggctggagtgcagtggcgtgatctcggcacactgcaacttccacctcccaggttcaagcaattctcctgcctcagcctactgagtagctgggactacaggcgcccgccaccacacccggctaattttttgtacttttagtagagatggggtttcaccatgttagccaggatggtctcaacctcctgacctcatgatccacccacctcgaccccccaaagtgctgggattacaggcatgagccatcgtgcctggccattaactttttaataatagtcattctgactgacgtaagatggtatctcattgtggttttaacttgcatttatctgctgattcatgatgttaagcatttttcatatgtttggtggctgcttgtatgtcttcttttggaaaaaaaaaagtctgttcatatcctttgcccactttttaatggagttatttgttttctcttgttcttattgcagtagcatgctgttttgattactatagccttgtagtatagtgtgaaatcaggtaatgtgatgactttggctttgttctctttgtgtaagattgcgttggctattcaggcccttttttggctccatatgaactttaggattgtttgtcataattctaggaaaaatgacactgataagctgatagtgattgcattgaacctgtaaattgctttggatagtatgataattttagtgatatttattcttccaattcatgagcatgaaataattttccatttgtttgtgctatctatgatttctttcaagtgttttgtagttacccttacagagatctttcacttccttggttaaatgtattcctagatattttatttatttattgtaactattataaatggaattgagttcttgatttggttctcagcttgattgtttttggtgtatagaaatgctgctgattttcatacgttgcttttgtatcctgaaactttactgaagtcatttatcaaatctaggagtcttttagaggagtctttatagttttctataagatggtaagatcatatcatcagcaaactgagatagtttggcttcctcttttccaatttgggtgttttttatttttttctcttgcctgattgctccagctagggctcctagtactatgttgaatgggagtggagaaaggaaatatctttgtattgtttctgttctcagggggaaagttttccctgttcagtatgatgttggttgtgagtttgtcatatatggcttttattattttgaggaatgttccttcaatgcctagtttaaagtaatggcactaaattaggagataggaaggatccaggcttcatcaagcatcattacatgatttccaattttagttaaaattgttccctgctgtaaaataccatcagggataatgcgtgcatactggttatgatcgttagataaaggattcttcccaactacaaagtagcaactttactaatcttcaaatattattcttttccagactgtgacaaagacatgctgatcaacattctgactcagcgctgcaatgcacaaaggatgatgattgcagaggcataccagagcatgtatggccgggtaaggccactttatcttgacctatttctagggcaatctcttgagaactaaccacactcacggataataggtattttttttttcaatctcacagattgcaaatatctcagacatcattatatgtcagatacagttcatattcctcttacatgtttcaaggaataaaatctatattatgaaacaaatatacatgtgagatatgttcacactcacagtgaccagtgaccacaagttctttccccaaaatcattcagtgtccccaaatgaaaagttttgatgaacttacattgccagtgggtccaattaggcttaaagtgttgtgctggaaacacccctgtggcgagctttagggaaggcacataaaaaattaatgatcaccagttcaaaatataacagcttttcctacagttccttgcaggtcctcacctaactctcaaccaaagtgaattctctaccagcttttcctttcaccagcatgcagctatagagaccattaaaaaagaatggcagtttaaaaatagtttaaggcaataaaactatccatagtgttttaaagtaatcatactctaatttcaaagcaagtaccattaaagattccttgcttttgctatgcatttaaaccacaaattcagaacaaaaactcttcaggccaaaagtgcctgaaacaacaattacttcatcagctgagctttatcaatgaaacattatcataaaactttctcagtagagttaatccatgtaaatttactccacctctaaaccccagtctttgaacaactatagtagatgaaataaaagatatccctcagctttagattgaattaataatccaaaagctactatcagtagtgaccttagttgaagtaagccaaagtagaagaccagtgatatcttcttttccacataaactgttacctcagcctatgttccacctacaccagtactagttttcttttgaaagagaatataaaaactataaaagttgtatcactggtaatctaacattgttttaatatgcatagtgctataagaaatgtctttttttttttttctttgagatggagtttcgctcctgttgtccaagctggagtgcaatggcgtgatctcatctcactgcaacctccgcctcctgggttcaagtgatgcccctgcctcagcctcctgagtagctgggattacagctgtgcgtcaccacgcccagctaattttttgtatttttagtagaaacggggtttcaccatgttagccaggctggtctcgacctcctgacctcaggtggtctgcccacctcggcctcccaaagtgttgggattacaggcgtgagccactgtgcccagagaagaaatgccatttttaagtaacttttttttaacccaaaggtttacatacatttttgctttttacaaatcaggttaaatttagactgaaaacattactttatcaagctctacaaaactatgctaaagcagattaaaacaattttaaaatgaagtacttacactcaaggaatttaaaatctactaaagaatttatactccactgaagaacttttcactgtacatataaagtctcagagtttgttaaaccctcagttttgctgaataattcatacctcctggaaaaccttggctgatacactaaattgcactgcctggaaaactggaagtcatgtttgcctctttcctctgaaatacccttgtcatttataatcaattagcaagttctgtaaattatttctcttcacacatttctctctttaaactgacttacacagtcttgatttagatcttcatcattttgtgcccagactaatgctgaaattcctaaatggtcctgtctacccctagtcccttcccactccagtctatccccaaaccgtagccagaatgactcaaaatctaaattttcacacatcactttgccactttaatccttgagtgtttatcttgtttctccctacaaacatccgtgtttccatgcgctactaaaaagtatggggaatcctcggtccttgatcatcttgggagtaagataatggccaagtgacaattcaaagacagcagaaatctttacttgaagggaaagagggagcagagagtttatttaaagagacaggacattctgaaagatgaggcagagcaggctgctgaaagagaatgggccaacagagagtcctgggttgggtttttataacattggatttttcttcacgttccctgctctgtctcaagtctctgccttttttcattatctagtttttctgcttctgccgtaagcccttgccttttccctgcctagtttccaccccaggtttgtggggccctcccttactattagtcagtgcgcatgcgtgggccaggggttggatacgaattctatctaatggctgcactgctcattaccaccaccccagtaaggtcgtacagcagtcaaattggtacttgtgcctatatatctcttaggaatttctcctttttccttttcctttctttctgctcacagttgactaattgtccacccgctacagcattagggattctattaatatgtaagcggtgggtggtcccttgggcctaagacttcccaagcttttcctttctcaagggctccccttgagtaacccgctcatgtctagccatctgcctacacatattcctacacatggaataaacctaatgccttcccagggcacacgaagccttgcttgctttgttcctgctctccgtcttcatccctctccccttccctaacacaattttcacctgcagtcaaatagaactgctatacttgtagttcttcaaattaaccatggctgcccctcaccaccagtcatgttgttttatctatcttcaataacctgatttcaataccacaggctggacacctatcatccttccaggtactagacacaagacctcacagccccccaccagatcgagtggaacagacttgggctgctaatacatcctttttgtaatttcctcacagtaactaatgacacatctgagagcttgtttgtatctgtttcactctaccacagtctaaagctttgaaagctgggatgattcttgttcatcctagagcttaccataaatgtctgtctagcataccaagattgcttaattaatgtttattgaatgacattgtaaaggtgcatctaactacaactcctccaataagacacaggcaggctttgactgctcctgtaaactttcccagcctgtcatgctcaccctctactctgtgtttcctgcttggttccaagagatccttgtgcataatgctactgggttgtgctggttcacttttacatcttgccaataacactgtaatctcctggaaaagcagggattgtaatatttgctgctatccctccagagcccagcccaggtctggcatagaagaggcatttcatttacagaatcagtgaatctaaggcattatattctgcctatttacttttttttaaagaaaaggaaaagcatcctttcattatccactctgtagttaaaatgaatctacaccaattgcctagatttcttttctctcattccttgccctggctgctaccaggttaatttctccgaccatcagtaaggtcttcttgacatctaccaccgctcacatttaggactacttcttccacctggccaaggtgtatctcctgctacttttccctttctgtggtaagaatgtatacattaacccctatgttaatcaatggtattttaaattttcattaacaagaataatcaagagttgacagaatcattttcttagctgctgagtgaagtacaattctcagcaggctccatgaacacttcttacttgacattttacattcgtgcagagtggctgaatttcatcagctttgccttacctattgcagaaactaatccctagactcaactgaaaatccacttggaattccgctgattgacatatttatcaaagtaattcatgaggtcacttctgatcttccccaccaaagcaagtgctagttaaaaacaatgcagtgacaccaagggaacaatgaaatgcccttgtgaatggggagaagaataaacagacaatgattcttggagaagttcaaattcagcattgatgcaattaattttctcatttttcatctaaaacagggactatccggtctaaaatatgctggtttctgtcattcatttaacccacatggttggttaagcaatttagtgccggggctgacttgcccaaaagtaaaacttcaaccaaggtcatctgactattaaattgtctcttccacagcttctcagtaatgcccactgttctcaatggagcaaacactcaggcttacaagggcagacatctatactgccaaatccctcacatctttcaaggttttgcttaagtgtcaaatactcaagagggcctaatctaaagctgtcactcaccccaagccctatgctagagctccagatacccctcacctgacccacaggaggaagtccagggcaagcctatcatctaacagtcttggccagtgagttaaggcaatcctgaatgccttctaaggccaaaatggtgtaattaagtgtcctctctccaggtgccaagattgttgttcttttttttttccttttctttctttgagacaaagtctcgctctgtcacccaggctggagtgcactgccgcgctctcagctcactgcaacctccacctcccaggttcaagcaattctcctgcaacagcctcccaagtagctgagattacaggaccgtgcaaccacgcccagctaatttttgtatttttagtagagatagggatttgccatgttggccaggctggtctcacactcctgacctcaggtgatccacctaccttggcctcccaaagtgctgggattacaggcatgagccactgcgcccagttgttgttcttacttaccactagaaaattgacctgttccattccagtagatataacttcagtttttttctatcatttccaactgatacctagaactttaatatggaatggtcaggtgcaagagggacaaagccatttgtatacaatttccggaaagctattatgtcccacacatagtgtaccacacatagtgtacccacaacaatgatccttaaccttatgatctgggatgatgagattccagagagaatccaagtgactgaaccagaattgagtttgaattcctatgtccacttttgattaggctgctacccagagaatagaccaactaggacaccctgaggttggtattgtaatcgcccagtggtttctccttgccctgtgacaagacagagctggtttatcaagacaggggaatatagagtttaattcacacagagtcagctgtacaggagacaggagttctattatcactcaaatcagtctctccaaaaacttggggattgggatttttaaggataatttagtgggtagggggtcagaaagtgtggagtgctgattggctggtacagaaatgaaatcatagggagtcaaagctgtcctcctccactgagtcagttgctgggtgggggccgcaagaccagatgagccagcttatcaacctgggtgttgccagctaatccactgagcacggggtctgcaaaatatctcaagcactgaccctaggttttataatactgatgtagtattgcttcccggccttttggataagatcaagtgtataacactgatgttttcctgaggaacaatttagggaggttcagaatgtcacagcctccagctgcaagactgctaacccataatttctaatcttgtagctaatttgttagtcttgcaaaggcagccaaggggatttgttttagaaaagggctgttaccatctttgtttcaaagttaaattataacctaagttcctcccaaagctagttcggcgtatgaccaggaatgaacaagtacatcttggaggttagaagcaagatggagtcagttagccagctctctttcactggaattgcctcggttgtaagttttgcaaagttttgctaacaccctacccactaaattatcctttcagtattaagagaaagaaagaagcatcatgcttagaaaaggtcagagtgaaatcccaaattttacaaataggtttatatgacccttttcctccatcatggtcattttccaagaaattgaaaggaggttaatattttccaggaaccgctgaattcagggaccaaacttccctactaagctaagtaggccagatgaaggtcaagaagatagagtcagaagtcttactgagctgatcaatttgcagcaataccagaagcctagggatggtggagatcatcaaataccttgactcttagtctattgttgagtggctttttttttttctttgagacagagtcttgctgtgtcacccaggctggagtgcagtggcatgatcttggcttactgcaaactctacctcccaggttcaagcagcctcctgagtagctgggattacaggtgcatgccaccacgcccagctaatttttgtattctcagtagggacggggtttcaccatgttggccaggctggtcgtgaactcctgacctcagatgatccacccgccttggcctctcaaagtgctgggattgcaggcatgagccaccatgcctggccttgagtggcatttttaataaaactgcatgatggtcagatttcaagtagtctagaaagccaaaaacatggcacagattattttcatgggccacagtgatgtggcggaagtcagctgattgacctgaaacagcaatattgtaacttgaaaaagtgttatcatttgtgaggacctacagaactctatgaggtaatcaaagtctgatgcaatccatctgccagaactacaggggcaatatcctatgaattgtgatttcctttgccaggaaaaacgcaagtcaacctttgacaaaagtgacaagattggcaagcggtggtaaccttggcgtcagaaacatagaatgctttaccatatgcccagcttttgagggtatatgtgttgtgatgtccagtctgatgatgaatacaggtagcaattgtgtgatctgagcaacgcaggctggatcagcacctggattccagttggtctcatcagagaatcagcccttactgtggacagctgcaagaaggacacaaaagttatcagaacctgcatttttccccccacagactacagaaggaaacttctgtttaatatgcagtttgtgtttttccaagagttaacccaaagagaaggctaacagcccaagagtgaataaaaacattgagtttatcaaagggaacactgttcagagctataatagccttgatttctgcccatggggcaataatcattctttttttgttctgcacaggtgtttctgagttgagtagccacagcatcccagtggacactatctggtttcagcttatctgaatcgccagtgaaccaggccatggcatttagggcaacagattgaggtccccattgaatcagcagcttgctgatttccccaaaagtttcccccagtggaatagctaccatttttttcatgtaaatgcaagacactgcagggtccaggcctactggattctttgatgtaccacttctatttgacaggtgagactggctggtttcttccaccttgccattcattgagtcccagttgatttaccctaatatgggaatatcaggcatcagggtcacaaggcctccatggatcaggcattcagtttatacaagagtccaatagcaggccagtagctgcttttcaaaggggatatacctggaattgtatcaggaaggcagcaagtttaaaacatcaagaggcgcctttgagaagctgctttcccttgccagaggctccaatcagcaaaccatctatcatagaaacttatgcctgaaagtgatcattaggcttatggggcttcataggtagtagcacttcttacatatgctgttttcctgtggaaagcatcccctccagtatttaggagcattcacagaagaaacaaataaacatgaataccaagtacgttcaacagtggaagttatactagtctaaaggtctccaatcataaggttttttgactttccttctccatttcaaaccttgttcaaacccatcctttgaattcgggtttactttcaccgatgagtccaggtagaatggtgacatggacacctgcatccaacagattcacatatccttgagtcctcctgctccacaaaggcaaatgggcatggccctagtccacaatgggaataggaagatctgtgtcccaccctcactcacttttttcctgaaagcagtagaagttggggtagagggaaggaaaagttcaggggacatgagggagacagaggctctgcattagtcagcatgacacgttgatatcctgtacagtggctgtgcacacctcaatcaaatgaatttccaatggttttggcctacacaaagtcctccatcaggtgcaacttcatcattactgaccccatgtgtttcagctttgtgggcccttgagccagaggtcagaaccacagttatttctgtcacagccaaggggtttgagtcctttgagtgaattgggtttgacccatatgtgacaattttttttttttttttgagacggaatcttgctgtgttgcctggagtgcagtggcatgatctcagctcactgcaacctctgtctcctgggttcaagcaattctctgcctcagcctcctgagtagctgggattacaggtgcccaccaccacgcccagctaatttttgtatttttagtagagacggggtttcaccatcttggccaggctggtcttgaattcctgaccttgtgatccacccgccttggcctcccaaagtgctgggattacaggcatgagccaccgtgcctggccatgacaattttttaaaatgagtcagtctttgaaatggactctatcttacttgctaacctatgttcacaataacatctcttacctcaagttttttcctgtaattgacataggagctggggaaattttctaggcacatattattattgatcaatatttttattccaccttgttttatactccctcaaattagtcattattatgccattgtataagttagtgtttctttagttttatttgtgattcttaatttatttgtacatttttcttctaatacccaattctatgtttctgatttcgatgtgattttttttcaaaaggacattcattagcagttcctttttttctggaaataacaaataaatgttaaattatttcaatctttccctgagaatatttttattatttcctcattgttagatattagtttagatagctatagaattctgggtggaactctagttattttcccctacatctttgcaaatataacttcagttttgttttttgttttttctggcccttatcgacacttctgagaaaactcttctgacatcaagaggtattattttgtttgttttgatccttttttctatagattctctgttattctctggatgcttttaagatagttttctttatttttggtattctatagtttcactgtggtagtcaacaggcttgtacatttttgtctaaatagctgaggattcacgtattctggaagactggaaatagtgtctctccagcattgtccacattctctcctactgtaaatccttttagaccaaagtctgtccgtctcattcaccctttcaagtctgttaactttatgttaccatataaataccatatatttcttgtccacatatgtagaatatttttgtcactttaaaatgtattttcccaatgtgctgatttcattttcagttttttactagctactctttttagtttttaatttctagaattttatttgctttctttaaaaagtctgttaactttttttcatagtattccctcagattgttattaatgatctcaaattcatggggtttcaattctgattgttgcagagtccactatatcacctaggagatgggtcttgttttttgtttctttagggagaatctttttctgttctggagtgtcagagaatttctgaagattggttttgcatttgcttcttctgttccatgagaatcactagtttgagatcagctttcatgatgatttctcttcatggaggtctcagttcatatgagttaaataaatttgaacttcaagcctcaggaaagcacaggtctattgtttcagattatcagggaaaatgttctcctactcaaagcctaggcaatgagtggtgagcgtgagctttctgccaatctttcaatgctgaataatatttttcttctagttcacgctgctactgaggatacaaccctttgaggatagcaacctcatatgtgagatttcagacttgattccctgtgttacattgcccagtaaatgttctcttctcctcatacagtgcccgaaattaggcactaaagcctaaaccaaatagctctcaaaaccagcctctactttccccagtcacctgcaggatcgtctccaaggtcagctcacttgcttatcttctggttttcattttttcctgatttttacatcaagcggtttctctttcttctgaaatcatgtatactgttaaaagtatttctgttactttttatcaggtatttgaaaggggagagtttagatttaatataccatgtgtgtctagaagaccaaagtattatcattattatcaaacaaaaaaccccaaatttcattgaaaattaaataattatgtaaactgcgaaaatatctgtaaaatgaagctattcgaaagaatattctcttaccactgcaaagtgacgaagcaacttgcacaaacatttttataatactgtcagctgaagaataacaaggttcataaatttggaaaagaaagctttatgttttataaaaggttgcagcctgcagggtggccattctgacaggctgggaagcatggtctcctgccgaaaactggaaacagacactttgatagccagaagaataagacagaaatttatgcagaacagggtggctgaatatacatattcaataagctataggagtcatgaatatttatgaaaggagaaacacgcacatgcgcagttaagcttcatacctctccacaggacccacgttcaaaacatggtggtgttagcatgttgcgagggtggaattttcagccctctgacactgaaaggtgacagaaaaccctcactgcacatcctccatagactggccagaaccactaagcggtcagtggtctctagccaggaaagaatgctggctggttgttttgtctaaaccacaaaaaggagaggcagtgtaagagggttggttgatatcaggggtggagtaagtctttccaaagggctggtttctggttaactcttaggaaagaaaggcagtgagctagggagggggtaccataaggtgtattctaaattccatcccatcattgctaggaactcagttttcaagattgctctggggcccccttggccaggaaggggttcatccagtcagttgagggacttaggatttcattttaatttttcaatataatataaaatgatgcaagtatttacatagtgaccactgggggagggagatagaattaagataaattctaaatttcactttatacagcatgcatcattgatatttaaacagcaaagaacattttaaataataatagaaaaagccatataagtgaaaagcatatgaaactattcccctgagcatattcagacaagaaagatgttagtcttacttctatttcttgcccctgtttatccataataagataaaggtaagacgaataagaaataagaaaatgccattttatttttaatttaaatggagtggttagaatagctgcagcaagggtagtctgcagtttcattggcaacacagaacagctcaatttgcaaagcaagtactcattagcttaatgtaaggccaagctgtgattccagcagagtctgctttagggcaagtcttcggaatacaggaaagcagaggcagtccagctggggaaagtcacgctgcaaaggttgcatttgaaaagtggtgtatatatatataaatcctagtgagaatttaatactctaattagagaacctatttgaaggctccactttgaacttgtaatgttcagttatttaaacatgttattcgatatttatcttcccaactgaaagtaacacctccttccagtgtcctgataatagcatgctattcccattactatagcacttaccaaattttgtattgtaatttaattgtaattcctgtatttctctccactgaagaaaactgcttgatgataaggaccttcacttatttatgttcaaattgccaagaatgactccaaacaaataattgttgaactacaagtagtcctcattcactctttcattcactcattcattttgtacctatattgtaagtgacgactatgtaacaggcacagttctatgggctggtgaaatagccgtgaagaaaacagaccaacagctctgcatgatggagcttacattctacctattccacctgggtgggagagatcatgcatagaaggcaataaatgctttggaaaaaaagcagaagccaggtaagaaatacaggaagtgtggggagatggggtgtaattttaaacaggataaacagggcaggcttcactaagaaggcagagggggtggaccctgtgaatacctaggggaagaacattaagggcacagtgaagggcaaaagtaaaggccctgactcccacagatctgctattccaggttcagaaagaagcccgctgtagccagagcaagagaaatcaggagcaaggagaattgtaggtgatgaagtcaaagttaccaagaagatattatgtatcttgttgaccatgtaaggactttgtcatttacatgggaataaaacactgagtgttcattttcttctaagatcaagtgtataaaataatggtatagtttattttggagtgtggcttgagagaaaacattttgagcagaggagtaactaatttgatttttattttcccaggatcacactctcaaggttgttgaaggagattgcaaggtacaaggacagaagggaaactcgcttggaggctattatatatacataataaataagtaaattacatatatatatatgtatcgcctcccagcaattctatttatataaaatatattttatgtaaataaaatataactcatagggcttatttaatatttaatatataaataatatctatattatatatataaacaatatatctattgtttttgagacaaggtctcacagttagtcactaggctagagtgccacgggacaatcacagctcactgcagcctcaccctcacgggctcaggtaatcctcccacctcagcctccaagtagctaggactacaggtgcatgccaccacactcagcgagtttttggcattttttgtggagacggggcttcgccatcctgcccagtctagtcttgaactcctggactcaagcaatctggcggcctcagcctcccaaaacacaggcatgcaccactgtgcccagccagaggctattatattaacaaaggagagtgatgatggtggcctgggtaaagatcgtagcagtaaaagtagtaacagttcatcagtttctagatagatttgtaagttgcagacaatagaatccattgacaatcggatatagcaggggtaaccaaggagaaaatacagtcatgggttcttagtttctgtttctggttgggccaagaaagggccttccccatccctcttttctgcttatcactagagagagaaactaaaaaccatggcttcaagctgctaaaagcctaaagcaaaaaaaaaaaaaaaaaaacaaaaacaaaaacaaaacaaaaaaaaaaaccaataacaacaacaaaataagacaggttggacaagcttgggatatagtaaaggttgcaaaaaatacgggaaaactgtgaggtgaagagagacagacaaagatgggggacggtagagaaggaaacaacctaactaatcatgttttatttgcaacaagttacttaaggttttgtggggttggaaagacatatattgaatgcctataatatgccataaaatattttcagaattttacctgagttaaatcttttaacatttatatcaactctgcgaggcagatgctgtgattattttcactttgcagattgtgaaacagacacaaagaagttaaggaacatatttagaatctcttagctggtattttgcactgtgaggattcaagcctaaaaaccctacctccagaacctgtacattcgaacattagatgatatctgatattgtttattttcctgaaattatattatttcttttttttttacaaaattagttcactgtaactatagctatgtatacacacacacacacacacacacgcacacacgcgcgcgcgcgtgcctctgagttgaaaacaaagatacaagcgccatctactggcactactaatctcagtctacaattcagcattagtacaaaaatatcatatgtaaagggaagaaatatgttgtgatacatgtgtagggtgggagtagtgatcaaataaatgtgactaaaggttaaataacaaacttttgcaatgcttgcatagtcttcagcttgaacattgccttttttatcctttaccaagtttttctttatccacattcatccattattctttcatttgcttatacattcatgtatgtattatttataagctgtactccacatattttgtgcactcagtactttgctagagctagatgctgaattttgaagaatttgtgagaaagtccatgtcctgatagacttttgggggaaatatgcacatatatttatcatataatgtggtcactgaaatataataaacgcaaagataaagcagtggtggccaggaagtaatcaatttcacttagggatagaagaaggcccatggaagagatgatcattttaatttttctacctttctatcaactgtcaagtgccactatcctgtagagataaaagtatattgaattgatccatttgcattcaaaccttcaacgcattgccacaagatttattttaaaatgcctaaaatgtgccacaggtaccacctatttgctatgttcatcactttggtcgcatataattagtggcttcctatggtgctagctatgtcacctttgtgtgcctgattttcttatctacatagtggaatgaatacagttcctaactcacagggttgttgtaataaattattacagttattctaatattcagaataccatctgacaaatattaagtattcagtaaatgctagttgttatgataatcatcacattcttctgcctggcctactcaactttccattattagggcctcatggtataccctttgcactacaaggacatccaaagtctcttttgaaatattcagatttcaaatcaacccaacatttactgaaggctagctgtatacttcacaggcacgtttcactctacccagaacagtaccttctctgtcctgaaacattatttattgttggtatctcctaagcctttgcctgatcaaatcccactttatctttcaaagctcacctcacaactacgctttccacgaaccttcattttatgaataatatctctaatttatacattcgtacaattctgtaagtttcaaagccttgcccttatattgcctctcttgttggcccttagtaatatatatattatattatatgtattacattatatataatatattatatattatataatgtattatatattatattgaatgtattatatattatatattatattatacattatattatatataattatatataattatgaattatatattttataatatataattataaattatatattatataatatataattatatattataaaatatataattatataatatataattatatattataaaatatataattatataatatataattatatattataaatatatataattatataatatataattatatattataaatatatataattatatataattatacattatatagtatattatatataattatatattataaaatatataatatattataaatatataatattatataatataatatatgatatatcatatattatatattatataatatatgatatatcatatattatatattatatataatatataatatatgatatattatatatgatatatgatatatcatatataatataatatatcatatatgatatatcatatattatatgttatatataatatatgatatatcatatattatattatatatcatatattatatgttatatataatatatgatatatcatatattatattatatgatatatcatatattatacataatttatattatatgttatatataatatattatatatagtattatattatatattatatattatatatcatatattatatatattatatataatatttattatatataaatattatatttatttatatttatatatattatatataaaaataatatatattatatattatatatattatattatatattatatattatatataatatatattatattatatgtaatatgtattatattatatataatagtatatattatatataatgtatatattatatataatagtatatattatattatattatatataatagtatatataatatataatatattatatagtatatatgttatataatatattatatagtatatataatataattaatatatattatattatatattatatagtatatattatatatactatataatatataattttatatatatagtaggtgaccacattgctttttaagtgcatatttcttgttttttgttttgttttgttttgtttttttgagacggagtctccactctgtcacccaggctggaatgcaatggcgggatctcagctcactgcaagctctgcctcccaggttcacgccattctcctgcctcagcctcccaagtagctggaactacaggcacccgccaccatgcccagctaattttttgtatttttagtagagacggggtttcattgtgttagccagtatggtctcgatctcctgacctcctgatcctcctgcctcggcctcccaaagtgctggggttacaggcatgagcaaccatgcccggcccctatttcttgtttttatccatcttggtgatgtttggctggagtaaagggacaaacacctggcctccaaacaggagactctattaattttgaataattttacaaactcttcctcttacctaggattctcatgtcacctctatcctcaggcttattaaaaaatcattcctctagggcaccaatattaatgatgaagttcatattttttctaaggtacactagcgtggaaaaaatgctaaaactactaaattacctgataaataacttgaaaccagtgatctagtggtatggcatataaatttgaaagtagtgaataaattgaagactttgaaaatacattatagatgccaaaataacattttaaaattaaaaattcacaatattgagtacaatttctataaaataaactttatttatgttaatacagtttgaacacaacacaatcaaggtatagatcatttctttatatttttttttcttttttgatacagagtcttgctctgtctcccaggctggagtgcagtggcatgatctcggctcactgcaacctccgccacccaggttccagtgatcctcctgactcagcctcccgagtagctgggattacaggcgcctgccaccacccctggctaattgttatatttttagtagagacagggtttcagcatcttggccaggctggtgttgaactcctgacctgactctacctgtctcagcctcccaaagtcttgggattacaggcgtaagccaccacgcccggccagtatagagcatttctaatacctccagactttgtgtctgctcctttgcagcccatctcctgacatcctcctgctgaaagaaaccactgatctgctttctacttgtccttatagatgaatttttgctatttctagaatttaatataaatgtaatcatgtcatatgtgctcttttatgtctagattcattttctcagaataatgtttttaaggttcacttgtgaagctatgtgtattcttttattgctatttttctagtgcatatatataccaatatttgtttattcattcacctgttgatggacattcattttcaatttgggattattatgaataaatgtgctataaatattcctgttctttgggtttataaatgttcatttttgttggttaataggaatgcatttgatggattgtttttaaatatatgtttaaactcatgagaaactacaaaagagtttgctaacgtggttgcaatatattacattctgatcagtgatgacagttccaaatgatccacatcctcaccaacacctggtattatcagtcttttaattttagctgctctagagaatatgtggtggtatctcatgatggttctaatttccattagtgtcatgaccaatgttttaagcatgaaaacatttaaacattccacaggcttattcccagtttgtaagttttatttggtgaagttctagttgaaaggtcttgtccatgttttcatcagaatgtcttaactgggttttaagagattcttgtatcttctgggcacaaatcttttgtcaaatatgtgaagtgacaactgtggttctcttttactttcttcaaagttccttacaaaaatttaaggtttttatttcaaagaagttaaattcatcattttttcatatattgtttattcttttatgtatcatgtaagaattttttgtctacaccaagtggcaaagatttgttctggtactttcttctagaagatttagttttggcttttctttttaagtatatagctctagtacaaattgaaatagaatatatcagtaagagcagacatccttgccttgttctcaatcttagaggataagcatttagtttttcactggtatcctcttccctgtagaaattttgtaaatgccctctatcagtttgagaaagattccttctttctttgctaagaatttttttattatgattatgtgctaaatattctcaaatgcttttgctacattagttggtttagatatgtgtcctctccaaatgtcatgttgaaatgtgatctccagtgctggaggtgggcctgaagataggtgtttgggtcgtgggagcggattcctcatgaagagctctttccatgagtaatatgttccccttaaagagcctggcagctcctccctccagctcttgctccccctttgccttctgccatgattgtaagcttcttgaagcctcatgagaagcagatactggtgccatgcttcttgtacagcttgcagaaccatgagacaattaaacctctttgtaaattacccagccacaggtttttctttatggcaacacaaagtggactaacacgctacttctattgatatcatcatatagctttcctccttatactgctaaaatggaaatttacattgattaattttcaaatgcaaaccaaccttgcattcctgggataaaccctacttgctcgttaggtgtcattctttttctgtgttactagatgtgctttataaatatttgaatacacatgtttgtgtctaggtttataagggatatcagtgtgcaattttcttatgaagtttttattttaatttttgtattacagcaatactggccagataaggtaaattgagaaatcttctatcatccactaatttcttcaatattttgtataggatttactttaccccttccataagggcttgatagattacattagtgattccacctgggtctagagataggcgggagcattaactacaaattcaatttctttaattaacattgggaaatctaaattttctatttatgcttgagcctattttggtaatttgtatttgtcatggaatttgtccatttcaactaaattttaaaatatagtggcagaaatttgtttataatagtctctttttaccccttagtgtctacagtatacatacacataactcttacacttccaatattggtattttgtattttctctcttgttataatgcttttatctactaaaaaagaaaatccacagtgtatgaaaggtggtgttggattatgccaaataataaaatgaaaattaggactattttgtagttatttcaatgtggaatcttttacttgaattccagtattgaaccacctcagaaccaaagtattgcatgtttttaagtaaaactgaatatgctttacacagtttagtgagagaccattttaaacaccgttcagatttcttggtaaccctacagaaaataaattgagtatatatatattttttccctcaaatgttattttaagttcagggatacgtgtgcagaatatgcaggtttatttcacaggtaaacatgtgccatggtggtttgttgcacctatcaacctataacctagatattaagcccattatccattagctattcttcctgatgttctccctccctgcttgcccccgcccccaacaggcccagtgtgtgttgttctcctccatgtgtccatgtgttctcatcattcagctcctacttgtaagtgaaacatacagtgtttgattttctgttcttgtgttactttgcagaggataatggcttccaactatccatgtccctgaaaaggacataatctcatccctttttaatagctgcatagtattccatggcatatatgtaccacattttctttatccagtctatcattgggcatttaggctgattatgtatctttgctattgtgaatagtgctgcgatgaacatacacatgcatgtatctttataatattaatataatggtttttattcctttgggcatatagccagtaatgagattgctgggtcaaatagtatttctgcctctaggtctttgaggaatcaccacactgtcttccacaacggttgaactgatttacactcccagagtgtaaaaatgttcctttttgtccacaacctcaccaacatctgtggtttcttgactttttagtaatcacccttctgactggggtgaaacaatatctcactgtggttttgatttgtatttctctaataatcagtgatgttaagcttctttccatgtgtttgttggctgcacgtctgtcttcttttgagaagtgtctgttcatatttttcccactttttaatggggttgtttgtttcctgtaaatttgcttaagttcttcttagactcactctggttattagacctttgtcccatggatagattgcaaaaactttctcccattctataggctgtctgttcactctgatgatagtttcttttgctgtgcagaggctctttagtttaattagattccatttgtcaatttttgcttttgttgcagttgcttttggagttttcatcatgaaatatttgcctgtgcctatgtcctcaatggtattgcctagattttcttctaggttttttatagttttgggttttacatttaagtctttaattcatcttgagttaatttttgtatatggcataaggaaggtatacagtttcagttttctgcatataactagacacttctcccagcaccatttattaaatagagaatcttttccccattgcttatttttgtcaggtttgtcaaagatcagatggttgtagctatgtggtcttatttctgagttttctattctgttccattggtctgtgtgtctgttcttgtaccagtaccatgctgttttgattactgtagccttgtattatagtttgcagttgggtagtgtgatgcgtccagctttgttctttttgcttaggattgacttggctattcaggctctttttttggttccatatgaattttaaaatagttttttttctaattctgtgaagaacattaatgggagtttaatggggatagcattgaatctataaattactttgaacaatatggccattttcatgatattgattcttcctatccatgaacatggaatgttcttccatgtgtttgtgtcatctctgatttctttgagcagtggtttgtagctctccttgaagaggtccttcaattcccttgttagctgtatccctaggtattttattccttttgtagcaattgtgaattggaagtcattcatgatttggctcttggcttgcctgtttgttgttgtataggaagagcatatatatatttttaattccactttacatttgtaaaataaaatgcaaaatatttttatgtctgttttcatagcacatttagtatgcatgtatttctctttaagtgtttgactttcaatatttaaaataatattgcttgttatttgaagaaagttctaagactacttaattaatttacataagctgtttggcaatagtataaccagggacttctgctaaaagagactgttgcaatgataaaataaaataaagtgcatattttctttaaggagtaatgtttcagtaattccacaagaaaactaaagacccccaattaaatgtttttaagtttaacttttacatattttcataatgagatcaaaagaggagttggagtttagggtcagaaaaagaaaatcattctatgttcaaatgtctacaatgtgcatatgctatgtcatgcaggggtgagatcaaatcaacaattttcaagttcatcatctcatgtaatgcatacatatacatgtgaatcagacttgttatgctgttattattaaatgacatggaaaagaaaatattaaaagactttctgcaattatctcatttctcttgcaaatttggtaacatataataaatatatgtactttttcctccacaggacctgattggggatatgagggagcagctttcggatcacttcaaagatgtgatggctggcctcatgtacccaccaccactgtatgatgctcatgagctctggcatgccatgaaggtagtgatctgatccaaaaatatgcctgtaacaagtacaggccagtatttcagtagaggggaaactgccctgtgatgctcctacatacttatatgatcaaggagaggggagggaatatctaaacaatgatgtaacaatggaaatgttgtggtcaagggcagtggccttgttaggaaggtggagcctcctgggctgagtggctgggatcagcctgttcttttgttgtacaaagtcacaaacttactgagccagccccagtgctgacctacaacaaggaaaagtgaacaagcctccagggctattcagatttgtccctgagcatgtattcctatattgaggataatgtattaaaaatgatgtgaatcttgttacattatttgtaaaaatttgattaagtcaaaagaagatattgaatcagggacaatatatagatgatgtctttatattttctttttatgacctgaagttcattctttacagaaacatttttttttttgctcaaatgtataaaaatcttaatttggaagaattagaatcagtgtttcttacaggaaagtcatttccatgaaataagttgactgtggatttgttacagattttgttggctaggtacagggaacaaagagggccttggctttacttctttccaaatgcagatattaaacacctgcagaactgttgaaatcattccagtacgatgcttgccaatgaccagattaccacaatctgtgaacaatgtgtgacagaaaagaggcaacaggaaaaaaattaaaggacatggattttggccatcacatttactgatccaaataggcattgtacaaaaattatatgaattttaactaatcgcttttaacacatgttacatgtcaattcctacctcttgcaaaattatgtctaaaaattatttaaaaaataaagttatatgtttatatgttgctgttttgattaaacaagtgtgttttatcaataattcatagaatgctaaggatttctgaggctttcctaaaaaaggtgtattgtctttaagatctctttcacagaccaatatatccatgtgtctgcaagagaccacagaaagcatccatccaaatatttatgcaaattgtacaaaattccacatctagagaggcaggcacaggtccctaaaatattctcggcaaattagaaaacctgtattctaatgtcagcttgctaaagaattaatattccagcagcaaatggaatatcaaatatcattccaacagcaaatggaaatgctcaatgccatgagcattgcttgaacatgtctttctccacattgtttagaaatgctcatactgttttattctaaatgaagaaacagtttccttcagataatattaattcttcagggtcaaataggtagtaaatggcaaagctgaaactaagattgtgcctgccttcatcctaaaccacttcctttccctgccacctctcaaaacactggaaatgctgtatccctttcttgtacaaaaggtacactattacttccaataaaaatatccttacatttatctcttttttcctttctctagggagtaggcactgatgagaattgcctcattgaaatactagcttcaagaacaaatggagaaattttccagatgcgagaagcctactgcttgcgtaaggaaatatacatatgtgaatatattttacacatataagaactttataacacattaaatattccagtttatgtattttgaagaattatctaagacattcttacatttaacataggattcactgaggaccaattaactcattaggtaaaaccgattattagtgcactaaaaatgaaaccattctctagacaatcaagttaagcaaattttccaggaaaataattacaagtctctatgaggtgaatgttttcattaagacaggaaagtgtcccacattttaattcagggggcatttcacctcttacccaggaaagacccagcatatagaaaaaataaggtacaataatggctcagtgaattctacaaatatatctgcttcgctttacataaatttcacattcccgtaatctactacaaaatcagatttttatacatttcaaaagtagaaagggtaactattttcactttcaaaaaggtataatgccttaagttctattgcgttatgtagtatatgacattgtgtgtcaagaaaatgttgcggacagtcatctctattgcattcaaacaaaaacaagacttttctgaagggaatgaagtcagaactttcactaaaatgttaaaatgagatgaagcacttagaaaaagtattgggctgggcagcattctgtggaaatagaatgcataattctgaattttgagaatcagagaatgtgaaatgactctcaatcctgtttttcaattttggactaaagatttttaaaaaatagtcctgtgcttatgttaccattaggtgacagaattctttggcagacggtttattgacaaagaaatgtcaacaggtggactacatttcctggactttgtactcacaactgggaaataacattaacttactcaaaacacactgatacatagttctataataaatcatacctttaacatgttttcttatacagaatacagcaataacctccaagaggacatttattcagagacctcaggacacttcagagatactctcatgaacttggtccaggtatggcattccaaaatttacattactttgcactatctaagcaaataagtatatgtcattgccaaaaaaaaaaaaaaaaatagaacagaaaactccagtatattacagttcaatagtaaattctgtgtagtaacatttactgaagccatgttcaaaatactcaactagaaatttaagttgttaaagacaaatatggataatgcctcaactctattttcaaaaaattaaaaatctattctaaagagattataaatatacatgtatgtataattaattttatattctgagaaaattaaaagattaaaaatattacagttaaaattaataattctaattagaaataatttctttctttctttctttcttttttgagacagtctcgctctatcacccaggctggagtgcagtggcatgatctcagctcactgcaacctcctcctcctgggttcaagtgattttcctgcctcagcctcccatgtagctgggactcaaggcacgtgccaccacatccagctaatttttgtatttttagtagagatggggtttcaccatgttggcaaggctggtctcaaactcctgacttcaggtgatccgcctgcctcagcctcccaaggtgctagaattacaggcgtgagccaccatgcccagccttagaaataatttcatttttaaaactgctacatgggcttagcgcacactaacatttctgagctcctacaatgtgcctagtactgtgtgaggagagaaacaattttctcatttaataacaacaaaacactataatacaaatattctcataagtacttcagaaaagaatagagaatcacaaagtataaagttctagctctatgattgtctgaagagctaataagtagaaatccagaatttgattgaatgctagagactctaaatgccagcatatgatctttgatgcagcctataaaaattctgtggtgttatatattaccaaaaaggaacactacttcaagttaaaaatagattttatcatttatgtttctgtactggctaaatgatatataagtatttccatttaatgaatatttcttgaaaatattccacatattagcattgtaatacaaataatatttttaaagatataattatctcctgttttatacatattctccaatgtgcctgttatcctatttaacaaaggcactcaggaatgcaaagagaaagagggtcagtgttcagctcttaatttctaaaagagaatctcaaaggccacagctgagaaacatgtcttaaaagccagaattttggtttggtttggttttgtgtttcgtgtgtgtgtgtgtgtgtgtgtgtgtgtgtgtgtgtgtgtgtgtgtgtgtttgaaatgaagcaagagtttctaaacctccaaacctttcctttacacatcaaaggcatagtagttagcaaagaattagtagtcaccaaagaatttcactaaaaccaagaagttgatagaattttgtacatgggaacatgacattagaaaagatttcaatgccttttaaaaaaagaatacatgaaagcctttttagtgggaacaaagctggaagagtaggacctaggagagagaaggatctatagtccaggtggaggggactagagtgagaatcctgcctaaggccctcaggaacacagagccccacactcttaggtgaggagttagaatcaccagataaaaacgcaaggtagataattgtctattctttcatccttttctctgaacccctccagtcccaattgcttccatgagttattggatttgtttttaatctaaacgtttctgtggctactgtggataaactctgagaagtcctcccctgtcctttatcctgcttggctttatctgaagaggtgctatggagaacagacagtcctcagtccctgaatttttatggtctgacttatctacttcatggtacctttctactttatgatggtgcaaaactgctgcaattttcacataatagttgatattccataaattatgtgagatatgtaacacactttattgtaaaataggctttgtgttagataattttgcccaactgtaggctactgcaagtgttctgagcacatttaaggtatgtgttcaataggttaggtgtattaaatgcatttttgacttgggatattttaatttacaatggatttatcaggacgtaaccccatcataagttgagaagcctctctatatccttgtaccactttcatagcagctcaactttggcaaatttagagtcctcatattttgtttatagcacacgttatcaatatttctttaatcttagtttgtaatgtctttgaaaatgaggatctctaaaaacttagaagagttgtgatctacttgcttttggttaggtccatttaccacttaaccgcatgcaaagttctttcctagatatatttctccggtatgactttctttgcatccttgctccctcatttatgccttttttattttcacgactcaaaaacatttccttgaaggatctcttagaaggtaaaactggccgggtattactagagggctgagtcataacaaacccttacttttcaaagcctcttcaagtctcagcttacattgcttggaatcagtaagtggtttctctttgtaactcttcaaggcaccaaatttctaaactttctctcttctcccttgtatgtctgcttgcaaactagcaagttatttactgagcttatctctttcttgtaatagatgactaaaagcataaagtaaatgccatttctcaagctcacaggaagacctgaacaggtgctaccgatcagagtgcatttcccttccaagaagtgatccagagacttagtctccttccaccgttacaactggcttttaagtttatcatgtctgtcttcaacccagggaagcagaaagagaatagaggtttcttcacagaagtgttcatgagccttgttgcaatgcatatccatttctgctcagatatcactggctaaaccctcactcaaggaggcctacttaatatcaaaggtagtgaagttatttgtcttcaaggaagttgaaacaagttttaaatctgtatttagtgtatttcttcttcttcttcttcttttttttaacggagtttcactcttgtcacccaggctggagtgcaatggtgcaatcttggctcactgcaacctctgcctccctggttcaagtgattctcctacctcagcctcccgagtagctgggattacaggcacgtgccaccaagcccagctaatattttttatttttagtagagacgcggtttcaccatgttggccaggatggtctcaatctcttgacctcttgatccgcccgcctcggcctcccaaagtgctgggattacaggcgtgagccaccgcgcctggccaatcagtgtatttcaaagctgtgaaaaagaattgaacattgcaaccaagaaatacaaatgggtaacagaagatggtaaagacatgtttgtcaataaatagaaaacttatgatgatgactatattaggcccaaatagaatttctaaaagggaagcatatataaacaaagaatttgctttgttgtgtttggttttggtttggtttagtttaatttggatatctgtggtttggctacatagttcataaaactcccatgtcaccactctcagtaaatcatcctattctgaggattttcatctgtaggattatccatgtcagtggagaaaagataatttggtttttcatagtacaaactgaagcgtctggtaaaatgtaggtataagctcattttaatttgtaacagaagttgaggtcatttgcagaaaaatacattttcaataataattactattttaaaataatctcgattgacaagatgccaattgaatattttcttttacattttataagattaattttaattaaaattttttctcaatttaaaaggtaattttacaataatgttgctacaataatataaattaaagcaacagtttccactcagagattcttcttggcacaggtattgcccctaacagagtgaagccaacagttccattataagccattataaatcctaatatcaaacaagtttttattgctttagtaggaagaaaattattttcctaaggactttatttaattccattaggactgcatcacagccaaatcctgcttctgttccctccctcccataggtgttgatcccaagaacattccataattaacaggctggatgccgatctccgtctcaaagtcatcttcccaggaaacccaactggcaatatcccctctgtgtagagatgaggagacttaagcttagagaggttaagtggtgtacctgacattacaggtctacttaatgaaagggctgacatgaagtcaggcctagatgcactatacctctgctgttgaattgtactgctcctatctccaaccccatttggttccactccaattctacttctatttggtaaaatgtcaacgatcaaaactcaaatcctcttagcatttctgcacctctttaaaggttgagctataaaccacctaaaataactgacatctaagaattaggatcacagtgtatttttataaagtaagcattcttgtatttcaagggaaaacacaagttccgaaaatgaaacatgagggaaaataaatcacaagtgaaaaaataatcaatgaatggtgacttttggatgtaatagggcaatcaattttattcccaattgtagttatttttttcctaaaattaaacaatgatgctttattaatgatagggtgtgtacatgagtacgagtatttgtatatataatatcgtttgtgtagatatacatatattttaaaataacacacaatattttatcactggtttttacctaatttagattatgaatgaacaggatgaactattacttttttttaaagataacatcaacttgaatttttaatttgattttccttcttatatatgtcattaaaattttcaaaaaatgtagcacctataaatttctagaattacatgtaggaatagttcagatttttattgcttccacacacaactttatttcctagttttatcttaacagaaaaagctaatcctgtatactgcagacaggacagaatcaacattctattgcttgtgttttaagtttagagttttaggcttttggctcctaataggcataaaggtcttctccaaaccatgattcaggacccaagactcttttccgtttgtggttccaccaaaagtgttacttcttaagtttgatttctagaattggaacattaaatatatgtatgagtatttaaccttggaacagcacttaagtatagtaaaattttcctttcaacatagaataccaaaaagtgtgggtgaatcaaggcttacattttataagaagccaaggaaaattaataaagtttactttaacattatatacttacaaagtttcacagtacattttccttaaaatataaaatacacaaaaatacaataatacatatttcataaagattatttaactcataatagaaaatggaggtaccaaactattaaaaacttaatataatctcctttaataatagtctcttcgaaaatcagaagttccgtgataatttatactgttagtaaaatgtatgagttctcttagattgttaaatagttcaaagattttctattggcttctcacttctacattaatggcttctcagtttggaaccactgacttaggatttggatcagtaaattcagaaaattggaaaagatataaagtgaataatgggattgtaaaagtccatcacttctcttgatcattgtctgtggtgtacacaatttcagagagaatctgtcaagatattttacaaaaagaaatggagttttcttctaaagggaggtgaaatttggagctggtgagttcctagtgggtaactgtggggcaccatagtgtaatcaaatctctcccatcagttttgtatctttggatttatcatttaacctttatgagattcaggtttttactctgtaaattaaaggatatgagctcatccttctttcaattcctttccaaaacaaatattctccaattctttggttgttataatcaggtcctctacctccctatgcatcttcacttttagaatcaaaggaaagatgacccatggttttcatatttttaacatcactaaaattcagacacacccattttttttgaattaatagagactggggtaattggagcataggagccttaggttcttgtgaaatggcaagtgttaaaaatcattgtcatattttccagaagacaagatcatttactttatctataaagtgtttcctgacaggatgatttctaataaggaaacaactgagctggaacacattcttcttgaaaactaatgccaattattaaactggctcacaatgcttcctgcatgcttttattacacagatttatgaaagatctaattatctgtcaaataatgaaaaattagtcacttagagattaattaatcaatatgtgcaaatcacactggagatgataaacgttttcaggaagagaaagaatggaaactacctaatggatacttactgcttaccttggctttcagaattctcttatgacagtttcttgaacccgtacaatgaggcctctgggagtgttatggccaacagctttcaataatcatctgtaatcaattcatcgcctccaaatattttcacccacatcttagttcttttcatttctttccttcccatgtttatcatgcccttaaactaaattctgtactcatttatgccattttctggtacttacatcaattaaacataccatgtggccgtctcaggccctttacatgacaaagccagcttgactctgcctttgtcaaagccaaatcacaatcttacttattcacattgtttaaatccaccagtgtgcttaaagtgctcttggtaattagctgcataggaaaataaacagataggcaccatttcaggttaaatgtccaaaacaattatctttccaaacaatatttcagatatgtaaagttgcagaaaattcttaaatatctctcacaaactttgcaaaggcaggagcttacttagctatagaagctgaagatcactaagaaaatatcaataatccagaaaatcttcccacatccactgatgcatctttgaagtctgctatctaaagttatttctttacttttccaattaacatttcttgaatgcctaccatgtgccaagcatgattttagataattgggaattattggtgtacagaagagataaagatcccagccagcccttaagatgcttacattctagcaagagaatatggacaattaaacataaatttaataaataggtggattatataaaatattagaaggttgatgaaagatatggcagaacagagtaacagggagaagcattgtagggctgagcataatgggtatgttgccattttttttttttttttttttgagacagagttttgctcttgtcacccaggctggagtgcaatggcacaatctcggctcactgcaacctccacctcctgggttcaagcgattctcctgcctcagcctcccaagtagctaggattacagatgcctgtcaccacgcctggctaatttttgtatttttagtagagacggggcttcaccatattggccaggcttgtcttgaactcctgacctgaggaggtccacctgcctcagcctcccaaagtgttgggattacaggcatgagccactgtgcccctcctgccatattatatagattggtcagagtaggcctcattgagaagatgagatttgagcaaaaatatggataaaagaatgagttaacaaataaatcaatgtgataggatgttccaagtaaagggtatagctagagaaaaatgtaaggtaagaaaagctaatgggtatgagggatagacacaaggccagttggtagcctctgagcaagcaaaggaaatgtactataatagtaaatgaattcagagaagtagcacgtggtaagattatgtcaaatcctgaagccattttaaggactttggcttttcctttgagtgaaatggatgagaggtaagtcattgctgggtctttagtgaaggaacgtggttttatgctttaaaatattcacaatagctgctatattgagaaaagactacagggagccaaaggtagaaacagaagcctgtaaggaggctgcttcagcagtaaagctagctgtaatgttacctcggacccataggagagcattggcagtggtgataagtgcccagtttctggatgtattttagatagcagcaggagacagacaaatctttaggcagacagggatggtaaaacccaaccttcacaccaaagacagtttaaagctgaaaacccatctacaagtctcagataaatccacagaccggattgggaacccctcttcccatgtgaggtgctttcctctggttgatccccagccttcacctattttacacattcctacccttccctaattggttttttacactgttgcgcccatctttgagtggtgccttttttttagcctttttgcgtcctaacaaaccaatcagcacatacccccccattctgagcccataaaaacgctggactcagtcagagcaggggattgcccaccttcgggtggtgggggaggaactacctgactttgggtaagggggctgcccaacttgggtctccctctttgctgagagctgtttcttcactcactaaaacccttcaccttgctcacccactgactgtcagtgtaacctcattctccttggatgtgggacaaaaacttgggacctgccaaacagtgagtgtgaatagagctgtagccctgtagcactcccttcccactcaccaagcaacaggaaaagtagctgcttggctccacatgccccctttagtcaggctgtcgatggtggaactaaaagagctgttaacacacccctattcacctggagtctccaagttttcaggcaccaccatgtcccctttgtctggacattggagtcacttgtgacatgcctggtccagccacaagccccacatggagcccgcacctatgccagcaattggaacagccagctggaccccatgctcactcgctcacacatcccctcactctgcgggctgagtgcgcagtcacagtggccacaggatccaggccaggtggcaaggcaaatgcagcccaacaggctgaatgggcagggtacctcctgccacaagcccagggcgagcaaggcccaggcaggagcattgccagccacagaggtctccaactggcaaaacgcacagaaaaaaaatcctgtgtcattttgaaggcagtgtctatattatttcctgaggaactggatgtgggctatgaaaaggccgaagaaaaacggaatcaaatgtgactctcagtttcttagtctgagcaacagaaaggatgaagtgcagtgtggaagactgagactatagaaagagtttgaggtggagggagtcgaggcattgaattttcaacatgctaaacctgatatgtatattagaaaatcaagtggagatgctgaattggcaattggaatatacatatctgaagttcagatgacagatctttgctagagatgtaaataaataaatgggtaagacaaatgggtatcattacaatatagatggaatttaaagccacatgagtagataacattatcaagagaagaaatgtaaatacagacaaaaagatgatcaaagactgactacttggaccttccaaaattaagagatcgaaaagaagagaaaccagttcacaagactgaggagtaaccaataaaatgaaatagattgcaggatcctggaagccaagtgatgaaagtatagcaagaagaagagagtgtcgattataccaaatcctactgatcgattcaataagatgaagactaagaattaccacaaatgtatgttattaaataaatggcatgtagtcacagaagatatagcatattaattgcttccaattatttgtttcttggtattaattaaaatcataagagagaatttgaaagggagccagaacatattgtgtaaaaataagttatttaggctaagggaagagtatggtaaccagacctcagagtcagaaatgccactgatatttcatacacattcttctctaacaatcagaccttgggcaattcacttaatatctctaatttttatctccaaaatatgaggtgggactcctaaggtacctgcacctcaacatttccatgatttgaagataacacccatagtcctaccactcaataacattattcactcctttattttaatacacagatttcaaaataagaattgcatatgtgcagtcttagtctcttggtattttaagcaaaggaaattgagcaagaagaaatgtgactgacaaactcatgcctatttcccatcagttgttcacctttaggggacatacaacttttgagttatgattaaacattaaatgttccagggctacacatttatgcaaaaatggtagcttacttatttctttgtgaataaattgcactttctcatatgcctctagctttttgttatcaagaaaaacagccctaatatttaatctaaaatggcaaatttcatctgtgtgatactttgaatagtgaatgtgggtgcacgttcaatgtcatcatacttttattgggttaagtatttgactctcagatttctggccatcctcctcctttctttccaagaaggcaattggtagagagatgtgtgtgtgtgtggttaatgaactaccttggcaacaggaaggtcaccactgtgtccttagatcaagatattgcctgcattttggctgatcttgactatggaatagcaattcttggcaattctggacattgaatatatgaggtgtcaatgaccagcatatgggcatttatcagtgttagctgccaagataagccactgatttaatttatgatcttttctctgtcttacttaggtcagagccaaactgaccagtttggtcagagaaacctttcatgatgatttagcctcacctttactctcacgggagctgaagactcccccaaaggtctagctgtgtctcccacatagttcaaatcaatgtggtctatcctgtagcccttggctgctggaacactgtccctgccatggtcataaacaactcaatctggcaagcttccccacaggttctcagctagattgcaagttcctccatcaggaaccggtaagaaatttgggatcccattcatactatttagggactgaggtttattcaaggaagttgtgtttaagacctctctgtgccctcttgctgtctcactggattcactgcactgtggctattcccagtatcctaaaagatgacaggactaggcacagtggctcatgcctgtaaccccaacattttgagaggctgagacggaagaatcacttgaggccaggagttcaagaccagccttgtcaacatggcgagatcctctttttgagaaaaaaaaaaaattagccacgcatagtggcacacgcctgcagtccaagctactcgggaggctgaggcaggaggattgcttgagtccaggaggtcaaggttacagtgaactatgatcatgccactgcattctaacctgtggaatggagcaaggccctgtctcaaaaaaagaaaaatggtagaagcagaagctactgtactttcagtgttctcttaacatagttggagcaaggagaaagcctcccctccatatcttgacccaaaagaaacagttaattagactgataacatgcctccctacctccttctccccactggccctcataaccctcaggaatcaatggaccctgcattggttagcgccccttccctcctgtttgaaatgatcaactggaccatgtctgttctctaaatgataatggagtgagagttaaacagatttacaaaatattctcactgcacaaagtctgagcttcattactattttgttgttgtataaatcctattgtgcaagtcagagatggactttctctgcatttttgctctaacaatgttaacactcatttctaacacccactgccatggtcaggcagtggatactcagtttgataagggagaagatactgcacagagacttggaaaactgaaaaatgcctaaatgtctttcaaacattaccagtgctgcaaagaaaaggtaaaataaaataatgcacattttaagacaaaaccttatacactatcttctaaagtattcatgaaatcaggaaatgaacacttactccagataataaaagaagttccttaggaacaatcagaatgtttttcaaggatttcagtctcactaatccaatatgagttgctgactaagaacatttacatggaaaacctgtgcttactttacaggggaccagagaggaaggatatacagaccctgcgatggctgctcaggatgcaatggtaactagaaccagttctcagactgactgcaaagaacctgggttaaaatgggctggagtggttctgatgctacttctctgctggctaatgttccaggtcctatgggaagcctgtcagcagaagacgggggagcacaaaaccatgctgcaaatgatcctgtgcaacaagagctaccagcagctgcggctgggtaattattaactgggtttcgttccagctacttgaccaattatataacaaaaagaaggtggttaactagaaacaaaaatgaaatattacaaggaaatagcggaaagtcagttatctcaaaggtacttattttgaattttgtttataagatgtgccttatttaatgacattactaaggaataaatatttccttaatattttttccaataactttcaaaaactgagcattttaaaaataatctctgtatttgatggagtacttattcaaatatattagctgtttcctattaggtatattatatgttgtcttgcaaaatgcatagtaaatatagtttaaccagtcaatactgcatcaaggccattagtattgatgtcatgatttctgcaatatcgacggaatcttattggtcttagagggtgcactcatgttagtttgccctttgtttgacattccctaaactacagtgtctttttcttttattaaaaaaaattttgtttttttctatataaagtacgcaaatggctgaaaattttcaacagatggcctaccctaccccaatcccacatctagactttacaagtcaataagagacattacctgtcttaatgataatcataataataataatgaaaagacatcttcttgcttctaattttcagtaagaatggatgagaactaaagttgcctggggtagtcagataactaagttcgtgaaataaagaatcttaatttaacacaattctaaattagtaaaccctagtctacacccaaaaagttgatttcatatttctcagaatattctttatagatactttgctattttaatcatcacagagaggacttttacacttaattctcatatttaagctctagtaggaagtttgctgctgacataagcctattatatatgtcctaaataactggtccataaataatggcttgttgtgtgcttcctctcaatttaaatcagcagtgagttagtgggtcccactggaggtggcatttgttccccaggagaagagaataataacaggtctttgaagttcaagatttatgctgactctactaagagtatttgtatttgtttcaatggtatttatagcaaacagaattgataacagtagtacttttaattattttatggaaaatatggatttttactatgtgtaacaatctaatatttgtattataatattttcaaaatctcctttgaattacatcaatttgttaaagttttccaggaatttcaaaatatttctgggcaagatatggtagatgccattaatgaatgttatgatggatactttcaggagctgctggttgcaattggtaagtaataaattatttgaagcacaacagacattttatttctctataaatgctgagtggctctgattgaactaaagatgcatgagtaagctcttgatcgagtcattttcccttgaatttaattttttaaaaggacattaactccataggggaagagtacatcagctactgataaaatgcactaaactggcaacctgataactttaatgaactgatacccttccctaacagctagttcaactttcataccagaaaacacatcattctcagatattttctctttgaattggcttctcacactgttcaatccattttatctttactgacttccattcccttgtccaagagccgataaatacttaacagtatggttttcttctctttaggaggaaaaggatattttagtgaccattactaataaattttggtttaggagtaaatcctaccataaaagagatttaccaagtagtgattttcctcaggctattgtgatagtggcacacctcttgctccttcctaagtaagaaatgatatccctccatagaggacaaaacggggcgagttatccagaaaaactgcaatagaactacctgtgcaatagaactacctttgtcttgtactgtgctggtgaattgacagcacacatttcagggacgaccaaaggggatcattatgaaatatctccatcgaaggcgtagtcaagtaatcacttagatactagttgaataaatgaatattgtgattttccatccttgaatggcagaggcatacacgggcgtgagagctgacagataaaggaatttttgtagcttatctagtaaagaagtctcaagctaggcttccatgaaaacagtttgatgaaacccctaaaatagtatgcaatagatgactattaataactgtgtattttttctgaaaatgttacatttattccagaaaattctctacaaaatttaataaccatatattacatcaaaatccttcattttataaacaatgcctaaggaaactaagtaactgcctccaagcctatcagctgattagcagcaaagttatgactaaaattcataatatccgaatctcaagatagctttctttccactatagacccctgccacaaagcagtgggcataagagaggaagtggtggacattagaaatggcagaaaacatttcaactgatttattcactcagcagacatttattcagcacctactgttctagacactgacttaggcactgcagatagaacaatgaaacaacaaaaacagcaaaagttcactgccttcaaggagcttttaaggagtagtgactcaagagtgattatgaagatttcgtgtattaaaaatgaaagaaaagatgagggtataatctcacaatctaaaataattacttaaactaccagggaaatactgttatgattatttcattctggctagaaattatagcctctcatacattacctattcatgtattaatttgttaacctcttcaaataaacactactgaatgtttatgatcatcaactgacttccagcaaggtaactgttgaccaggctctaggctgtcctaccaccttagcagtttttattagataacttctagaactagtctagaccagttgtggtccatagtttccccttaagagatttcaggtctactcacaaatctataagttactaaaaatagcattcaaatagatgaacagattacatgggagctatatcaaattcaatcctacaataataataataatctataatagtgttaataacctaggtctctttgaagctctattaatttaatattcagataaagatgataaagttttcactttgggaggcagaggcgggcggatcatgaggtcaggagatcgagaccatcctggctaacacagtgaaaccccgtctctactaaaaatacaaaaagttagccgggcgtggtggcgggcgcctgtagtcccagctactcgggaggctgaggcaggagaatggcgtgaacccgggaggcggagcttgcagtgagccgagattacgccactggactccagcctgggcgacagaacgagactccgtctcaaaaaaaaaaaaaaaaagaagatgataaagttttcttcattaggctacatgaaggaactaacaagagttccaacagatagaaatagaccaagtgaaaatctgcatgactcattataatgttgttgctttatatttttttcctgtggcttatagtgttaccattattctaagtgttgaccttacaatacaatgtaagaattgtaacaggaaaagtgttattgtttctcaaattctgacgaaaatatatgttttcactctcaatgtttcttcttctctctctgatttctcctagttctctgtgttcgagacaaaccagcctattttgcttatagattatatagtgcaattcatgtaagtaagacatatatttttaaaatttctccagaaattgtgtctgttttctcaaaggattaattttacttccatcatttaaatgttcattaccatttttgaacttgtatgtacaaagaaaatacacccaagtgagaaaaactggtttagacaccaaaaataagacatatcagataaaaataatgttctgctttctgtatcaaatttagggaaccatatttggggtgtatctccctgtgcactttagagattatttaatatctgcagaaactggtaaattcaaatgtttttgtatgtttccaaagacccccacatcagacttatgcaagtacaaaacatatggcattaagcagaaaatgtcaaaatattacaaactctcagcaagcaattgccacgttcgtgaagtttcaatacacgaaattatgtcaatggatatttttgaacattgtgctattttcaaaaagtatttaaagtgataactagaaaaccataaactctaaatctatttttgtaattaaatgggaatgtttttcatacttcagtgtgttattcagtcgcacatactttggagcattaattttttttttttttttttttttttttttttgagatggagtcttgctctgctgcccaggctggagtgcagtggcgcgatctcggctcactgcaagctctgcctcccgggttcacgccattctcctgcctcagcctcccaagtagctgggactacaggtacccgccaccacacccggctaattttgttttgtgtttttagtagagacggggtttcactgtgttacccaggatggtctcgatttcctgacttcgtgatccgcccgcctcggcctcccaaagtgccgggattacaggcgtgagccaccgcgcccggcctggagcgttcatttttttaaaaaacaaacacttaagtgcatcatcacataatgcactccttatccatatctacatgaaacaaaaaaagaaagtctcggccgcgcgcagtggctcatgcctgtaatcccagcactttgggaggccgaggcgggtggatcacgaggtcaggagatctagactgtcctggctaacacggtaaaaccccgtctctactaaaaatacaaaaaattagccgggcgtggttgcaggcatctgtagttccagctactcgggaggctgaggcaggagaatggcctgaaccctggaggcggagcttgcgtgagccgagatcgcgccactgcactccggcctggcgacagagcgagacaccgtctcggaaaaaaaaaaaaaaaaaaaagaaaaaagaaaagaaaaagaaagtctcatagagataattatatacatgtcgtagccttgaaaactcaaagaaaacgattaaaaataatccaataatacagtaattttaatcatcagttttatcctcaaggtaaatttaacagatatacttcttaaaagtagccagcatgctgggaaaatatgttaatagtcaggagtatgttattatatatcttctgcagtgtattttctcatttatgcaaaggaagaacctggataaccccagaacacaaaaggaagatcaatgctcacagtcttgcttctctcctattctattttctaggagaaacagttgatttggttaaacatttatttgaaatagtgtatttggaaatgctataggatgatttcaattgtttccttctcaaagaaccaaccactacaacaacagtatgaagcttcacttgtgaatgattatgggaaaataactacaattaccttgattccaattatgcacaaattcaaggctacttattctaatagtacatgaaaactgtatttttgctgtgtatgtgttataaggcaataggaagatatgcgtattcacaaatggtttgtaggtacggagaaggattgtatattcaagtaatgtaatttttgatacctgaagacctcaaatgtcaaatgtttgtcaaaaagctgctttaatcacccctgaaccaaagatatattctgtgttctcctccagtgaactctaaagtgaacgatctacattttaagtttgaatacttgttagatcattcattttaaccacctcaaattatgaaaagtttattagtaatatacattcaaaacattgtcttcaaaaatcagattctgttttctggccactagatgtcacgattactctgtttggaaagacaatttgaaactgatttgttagggtgcagtatttctggggctagcatacagacattgattttgtatttttctgcatttgaatttaaaccggcaaatatttgaatcacctagaattctaattttttataatttatcaatgatgacaagaaaataaaattaaaatgttactgctgtcttagacaaatcaatgtccatctgacagagctgagaatgtcttcccctccaaggaagaattcttaccaggaaggaccacaggatcagatttgcagtttataatgcagtgtgagtgggacggtgtgaaggttaacaaggctagaaagggggagcaactattgcagaatcagggtgaaatgataagggtcagagtcaaggtcgtggcactggaatagagagcacaaggcattcagaaaatagaagagaataattcactgtcagcatgcggtaagggagagggagaagtgacagaaatgactcaggatctgaaccacagcctgtgtggccagtgatgccagtgttggaagaactcaggaagaagagaaaatgactacagaaaaggggtgtgtccacttgggacagactgacttttaggatgctgtcttctcatttctcccacttttctgtatcttttaggactttggtttccataataaaactgtaatcaggattctcattgccagaagtgaaatagacctgctgaccataaggaaacgatacaaagagcgatatggaaaatccctatttcatgatatcagagtaagtttccgacacatgatttatttggacccacattttctcctttttgaaactgagataaaagttctcattcaaataacttcatggcagactctaaaaagttaactattcagacagggataacctagtttttttcctctacacagtctttagaacatcggcaggtgctaacttagaaaaccctttacctcagctgggcgtggtggctaatgcctgtaatcccagcactttgggaggctgaggcaggcagatcacgaggtcaggagatccagaccaacctggctaacacggtgaaaccccgtctctactaaaaatacaaaaaattagccaggtgtggtggcacacgcctgtagtcccagctacccgggaggctgaggcaggagaatcgcttgaacccgggaggcggagcttgcagtgagctgagattgcgccactgcactccagcctgggcaacagagtgagactccatctcaaaaaaagaaaaagaaaaaaaaaagagaaccctttacctcagcgacagaacttattcctctttgatgtgttttacccagaagcattgatgcagtcatgcaaaatattcattctctataattgtgcttaaagagctaaattctgaagtatgatcaggctcaggaaaaatatatattgcaaaaggctgcattacttttgaagaggtttcttaaatcagttgagctgtcctctcatattgtcatagaaggcagggcagtcagtcaaatatcataaactgctaattcggagggacttaatgttcctagctatatacaactctacatatccttatccctttagcccttgaagggcaaaggagcaatgattcagtactgaacaagccagtgttttcattctgatacttttaaacttcatgcattttgatacaacctaacaaagaatcctcagaatatataggaccatttactaactgagagcctagtggaaaataaaaatgcttggcactgtgttcaaaaaagtttcaagaatttcaggatggggagagcagagcattaaaccaagccaagcacagggacataagaatagaactgaacttatattttgtgcagaactaaaagctattaccttgttcacgttgttttcatctgaaatttgtaattccaagaagcagtgttttagtttattgaaagagtaatctagaagcaatctaaagcccaagagatcacataatacagaagactttgtaggcctctggagagctgaaatggtttctaagaggaagagttgatggagcagttaagagaaatcttattccttcatctttgataaaactctcctacagccactttcaaaactctaaactcttttagtgatgagaaatgcatggcataattcattttctaaatgaatacattagttcttaggcacttattataattaatcacaaccgactcaaagtctgctaatatgaaaatgtaattaatgtaactttgctatgtacatttaaagtactgaattatcattacatgactttgtgccaaagcaccttaatatgaaagttgatacttaacaaagaaacattttataatatttatttactactatcattgattttggaaaatatagaaattatagaagaccattacaagaaaattaaaacctccctaattttctacagaaaatcattaataaacttttattctgctatggtgtgcatgtttgtgtctcctgaaaatgtatctgctgaaattctaaccccaaagaagtgatgatactaggaggtggggtctttgtgaggtgattaggtcatgaacgtggagcccatgaatgggattaatgtccttataaaataggccaaagagaacacctttgtcccttctgccatgtgagcttagaatgagaagaaggctgtctacgagagacaggcactcagcaggcaccacatctgcttgatcttggccttgccagcctctagagctgttagaaataaattcctattgtttataagtcacccagtttatggtacttttgtcacagctgcctgaacacactaagacaggtactttcagtcattttctaaagctatataaataataatatgttttgctatgtaaaagagtatttttattgaatcatggtattctgctgtataagctataaagtacacaaactacctcacattattatacattgcttctcagtttttcactattatacataatattatggtgtatatatttttagcacaaaactttgtgcttatcaatgattgataataactttcttaatatatatttcttgaggtagaattactacattaataattataaatatttttaaatcttttgagacatattaatttgttctccacattctacattcatttataacaataataataataacattagggtacatcttcctaaagttgaggagaatatttaattctaaggcaagttcttataaatacacattcaggttcaaccgactttatgtaaaccacatactactgactgtaaccagagcattattcttcaacaactttcattgggagcagtacttagggcatgttaaacctttagatgagaaaagtaaataagtttagaaaggctaatggtccatggctctttcatagtgcagtccagaggaattatgcttcctttttagaactattatgatattttatttcaaatatattatatttttcttttcagaattttgcttcagggcattataagaaagcactgcttgccatctgtgctggtgatgctgaggactactaaaatgaagaggacttggagtactgtgcactcctctttctagacacttccaaatagagattttctcacaaatttgtactgttcatggcactattaacaaaactatacaatcatattttctcttctatctttgaaattattctaagccaaagaaaactatgaatgaaagtatatgatactgaatttgcctactatcctgaatttgcctactatctaatcagcaattaaataaattgtgcatgatggaataatagaaaaattgcattggaatagattttatttaaatgtgaaccatcaacaaccta

SEQ ID NO: 71 - DNA, 54920 bp, Homo sapiens
  source 1..54920: mol_type = genomic DNA
actaaccgacgcacacggggctggagaggacttaggaaatgcccacccctgcaggagggcgaatgcggctctgcgcggcactgggcgccgcaggggttaggggcggcagagggacctccggagcccgagacttcctggagcagctccgcagccggaaggctgctgctcctcgcgggcccgccgtgcccagtcctcatcttgggggcggggccgcgctcaggccccgcccctcccttgcactgcctctggcacctggggcagccgcgcccgcggagttttccgcccggcgctgacggctgctgcgcccgcggctccccagtgccccgagtgccccgcgggccccgcgagcgggagtgggacccagcccctaggcagaacccaggcgccgcgcccgggacgcccgcggagagagccactcccgcccacgtcccatttcgcccctcgcgtccggagtccccgtggccaggtgagtgagggtcccgagccggctgggggcctgggaccaggcggcggcagtgcaccgcggcgccgcgggtgaggcccggggctgcctggcgcccagcccagcgcggccctgcggcttcctggttgcactacaggcgtgggggtggggggcaggggagggcgtcggcgggtcgcgggcgggccgtgtcggcctggcagccccctagatcagcctcggcgtctggggctgctccctcatgtgtggtcggggtgcactcgccgtccccccgggctcaggggtcggggtctcagtctgggcctgggtagggccaggggccgtgaccctgggcgcaggaggcaacgggtggcgggaggggtgccggaggcccggccccgcagccctgcggagccctccagggtgcgcgcgcccttctaggcgaggcttggggagattaagcagagaaggctatcttcaggaactttcctccgaaactgggagcacgcacattcctgggagctgctaccattgcagtttatttgtaaggaactctccccagtgtttgagggaatgcgggagccatcccaggtgctgtgcgtgccttcgccccttccccaaccttgatccccagtttcaggaagggattcctggacttgtatctcccatgggtgcaggccaggcccttaagacttaggtaaaatggtctgttggtttaaaggagacacgcgaagtttgttacctagagactttggaggggaaaagttaagccagccagtgctagcccaagctggaaacagtcagcccggggcatttctgtctctgccctccaatccttgacctctctgtagagattcggcgtttgtggtagctctcccctctgttctctgcgctgggcatggagtggagctgtgaggccgagcccctgccctgccctgccctgccctgcccacgcaacagggactaggtttgcagggcagggcctggtatgctcacccttcactggctctcattgctttcctcattccttttatgcggcagtcaattgttggggattccaggggattaacagggcccctttcctcaaggcattctttgtgctgcaaggtgttccctgataagagaggccaggtgaggtgccagggcagtttgttgccctggcattgggtgcccactacttcaggctcctgcataccttgctatcttttctttgactattgtctgtgctttggtttttcatctgtaaaatgggggtaatagtaatccctgcctcacaggcttgtgagattcagtgcattcatttatttaataacaatacagagctcaggtacggaccagtcagaacaggtggtgactgctgcaccacacttgtgtatcccagatgggtgtcacccacattagccataaagtgtgtgaggcaggcctgggtcataaataatcaggtgtaagggtcaataaatagtagcagtggaaggttcagctaaagttgaaatgcacttctcctgaaccgtctttctggcttagctcatgctaagctcatgctctctgtcttactggaatgccctccctcccctgtctggcctagcattctccaccctcctgggagccatccgggtgcctgctcccagcaggagggacgggatatgctctgagctcactcagcccttctggcactgactcggttctcatctctcgccttgcatagtatttgtgtggcggtgtggcttatcgctgccctgtcctctgactctggagggtgggggctgtttctgacttacctcttggtggcagcactcaggatgggccttgcctaatgtaggtgctcagaaaattagttgtcgttagttgaacaacagagacagcacagggaagtggtttccctgtggttaaaatataggaccttgaaggctgggtttggatagagaaacgtggggagggtgagatggagatgaattgggactaagaggtgggagtggaagcctcacctgacgcctttatgcatgatactatagaaagggcccaccctgggtggatgtgtctagaaggccaggatcgattagtgatgcctagttcacgtgattggggaggtgatgtgtggcttgggatgacaggagtgggagttgagacagaataggttagtgtgggttcttcttggaaattgtagaatagagaaaagaaactggtgtgggcaggagctgaatgtggaaccaaaatgcatgctgaatgctggaacatcagaggtcctgggacctttctggtgcaccccctccttcctcctggattcacccctcttcttctgctgtctttttttttttttttttttttgagacagatttcgccctgtcacccaggctggagtgcagtgatgcaatcttggctcactgcaacctccgctccctgggtttaaatgattctcctcccttggcctcccgagtagctgggattacaggcatgcaccaccatgcccggctaatttttgtatttttagtagagacggggcttcaccatgttggccaggctggtcttgaactcctgacctcaggtgatctgcctgcctcagtctcccaaagtgctgggattacaggcatgagtcaccgtgcccggcctcctctctcttcttagccactgttttcccccgtaagcctgaagcagttcctggcacttgttcccatggggaagcgtctgtgtaagggtatgcttcaccagcactgccaaggaagtagacttttcactttctctggatttttctctgcaacaccctctgatcccattgcccccagaatagtaggaattttgagtgatacctagataggaaagctcttaggattaatgaagaaactgagattttcttggtgggagtttgtgcttttaaagggagttgttgcaattcaatggaactctgtaataaccactgaaactgttacacattaggcttactgaccctatctcctataacccatgaaataaagacctgatagtcacatagttgtttgctatttgggaggatcctaaaagtacagcctgaacagtgacccaaaccacagctggccttgcccatgctgatgtgaggaaggaatgggtgggggcaactaagaaattgggggacagagttctctgtgctaggtatcctaggacaagccacccagccacacagagaccccccgcttcccccccacagaacagttctggatgataaaatgcctgcctggaatggagaatcagatgagaagatgtttgcaaaggggtttgagatcagttagcgggtggtgatgacaatgttgataccgtgggtgtgtgactgccaggagctgtgaagcagagggtggagtgtgcggtggtcaaagcctggttctgggatctctagctttccaggggcttaggctccgccttagcagaaaagaaggaaaggaaattgagaaggaagtcaggtgtcccctgcccctcacacttggggatggctgacttggaggacatgagatgggggaaatctgagtgagggcagagaagagaaatgtggaggctgctcacagggaggctagggagcatatggcatatccagcctggggagtggcaccactgggggaaagggtgcgtgtgacagtggggaaggagtggtgataacagatgtgagcttgctgtgtccactaaaaaggtcacggctatttttaggaagtaggtgacaaggcatgttcctgtagaactgcttattactgagaacccactgttggcctcgccctgcgtggtgtgcttaaaaggagagaccgcccccactcaccctagagtcatccacctggtgtccctgagacatgggacactggatgaggaccaggtttggaggatgaagaagatcatgtatttggttttggacatgttgtgtttgaggtgtctttgagataccaaataagctggtgggtctggggctcaggaggcgtcttggctagacagacatttgtctaggttgtgtttgtatttgaagtcatgggcacagcgagattgaagaactcacctcgaacagctgagtaaaggaagatgagcctataaaggacccagaaaaagagcgacctgagaggggcccagaaagccaggacagagttgtatcccaggggccagggtgagtctgcttcgtgggatggagtggtcagcttggcatcgcggctgtggtgagtgatatggaggagatgtggctgccttcactgctttggtgggatgatgtgagcagaagcgaggttggagtgaatgggtgaggagtagcaggacgtgaggatctgatgatagacaggctctgaaatgttggctttgaaggcgaagaggacgtcgttgagggagtgtttgattctgttgcctcgatttaccctcctgctccctttccaatcccagaagggaacatgtggatggcctgccactgacatccctccccacggcgctccgtgctcaggcagacctaggtacctgcaagggtttgcttctttcacaaagtggattcattctcatgaatgaatgaatgagtgaatgaagcatgttgcccaggttggtctcaaagccctggcctcaagcaatccccccgccccgcctcagcctcccaaagtgctgggattacaggagtgaaccactgcacctggctggtattaaattttctttgtggccaactgcatgataaatattaacatgtttcatgggcgtgaaaggagaaaataggtcctctgcgggacgctgactttagatagatctcttaacttcagttacccttatatccctgcttgcctggctgtcagattctgagaggtataacaaaaactctcactgtagttttttaaagtccagctctacttatatttgtgggagttctagccttttgagtttggctttcgtgtttcatgtatataggcttatcaagctgatcttcctacctgtcatttgctggttatttaatgcctttggtctttggtcttaaattccatattgtctgtgttttaggagaatacatggccaaggatctgggagaatctcttttctttacagtcttaaaattaataaataagtgcattttataagataataagtgaaaggctcagaaatttaaatgcaggcatcagaggacattcaagccatgcccctttagcttctgttcaggctcacatggagcggttagtaatcaggtctcactgatgaccatgagctccctgtccttggctgtcctaatggttcccatgatagccagatttttaggaggggtggataaaatgagatttgcgtgcaaactcctgggacgttgcctgggaacctcttctctcactttgcaattcctgccccttcctgtaggtccaagaagcggactgctctgcctctcatttacgcatttccttcctcattccagacagcaagatgagtttttgacagagtagccagtacaaacacttctcagggccagaagtcagaaagacgcgggccccaagtcataagctcatctctgtgcttgtgttttaagccacataaactgtctcagcgggctggactaggctatgccttgttgtaccctgagatcctagtgagtagttctccaagtactgtgtttacagataaaggcaaatgccagagagaaatggctggaaaaaccccttggcttgctaaggcaggattatcgaaaagtcttcaacatatatgtttttaaattttacatattttttcatttttatttattttgagaccagactaatttttgtatttttggtagagatggggttttgccatgttgcccaggctggtctcaaactcctgggctcaagtaatctgcccacctcagcttcccaaagtgctgggattacggacatgagccactgcacccagccaaccactgtgcccagcctatttttactattaatatttccacctctgtttttctttgcatttatttggtatgtctttgcccaacccttagttttaaatatttctttctcacttaaaaaagtttatcttggctgggcgcggtagctcacgcctgtaatcccagcactttaggaggccgaggcgggcagatcacgaggtcaggagatagagaccatcctggctaacacggtgaaatcccgcctctactaaaaatataaaaaattatccaggcgtggtagcgggcgcctatagtcccagctactcgggaggctgaggcaggagaatggcatgaacccgggaggcggagcttgcagtggagccgagatcgtgccactgcactccagcctggacgacagatcaagacttggtctcaaaaaaaaaaaaaaaaaaagtttatcttgaagatggaatcttcgtaaataaaatttgtttctcttataatcagaacgtggttgagggtggatggaggttgacagaaggcaatgataacagcaacaaacctaattgcatggtttctgtctttggtagaggaattctgactgttgacataccagatatacttgattttattctttgcatcttgcttattacttattatacttgcatgcattcctttcctgatttttgctgttgggttaagtttctcatcgtcatcttccccacgccacctgtattacgtttcaggtttggttgtgaatgaagagaggagccccgtctctctctctctctctctctcactcactctctcactctttcttgaaaaatcagggtcgaggttaagtgtgtgttccatgagattgtcttggcaccaggctccttatggactgttgtccctagcattctcaagggctgtggttttcaaacttgagcatgtataagaacaatctggaaggcttgttaaagcatagattcttggactgcaccctgaatcattctaatttaggaggtctgtgatgggacctgagcacgttaattgcttacaggctcccatattgtataatgccgccgggccacatgttgggtagcaccgtctaggtgcctcccttaactgcatggcccaagacagctcactttcacatccccatggcaggccctcctagctgctaggggtctggaaagcagtccttagtgggggctgctgtgtgccaggctatggtgtgttctgttactaaagcaagagagaacagatggttgaggaggacaatcagaagtttctggaacaccacccactgctctcctgaatttgaaactactactatgcttatcagtcttgctgttggctaagcctgtgttcctcaggttaggaagtgggaatggtttctcatgacagtggcaagcccgcaggcagtgcaagcaaggcagcttctgttcctgtgggctggtgcacaagctggcaagctgctgtggctttgctgatgccccgagagtcatctgctgctcccagccgtcaggtctggcatccgcatactccattgctgcagccaccaccagatcttccagaccccatgggatcgaggggccccctccaagacccagtgggataggggttatttttttttttttgagacggagtctcactctgtcgcccaggctggagtgcagtggcatgatctcggctcactgcaagctctgcctcctgggttcacgccattctcctgcctcagactcacaagtagctgggactacaggcgcccgccactgcgctttgctaattttttttgtatttttagtagagacggggtttcaccatgttagccaggatggtctcgatctcctgacctcgtgatcctcccgcctcggcctcccaaaatgctgggattacaggtgtgagccaccgcgcccggccaggggttatttttttgtgctacctcctcccaacttcccttcttcaaccccaaatatgacacctaggtgactgtttctaggagagtttgagggcagaggctatttgaaccctgaactgaggtgggggtgatgttcggtctccgtggctggtaatatccttgagagatcagagcagtggttgccaacccccattctctgttgtcatcacacatagggaggggatctggagagaaacagggtcataaggctcctatggagtggctggtacttttctgagtggcttgattatatgggacattatttgggaggcagtagtaactttcttctctttccggggtttaacctttgtatttctcaagtccattctccagcctgagaaggtgtgatggagcccagaaatacgttgagtggttggggaccagcctggttcataatgcactggcctggaaatccagagatgtggttctagtcattgtcctgcccccagccagctctgagacctcaggcagagtctttctgctctctgggtctcagctcccacctcaaataaaataaacaggttgaatgaaatgatttcatgaaggccctttccagctccagtattttaggattcttatgtaatccaaatgctagtgcactgggaattgactttatcttgaagaagtgtctttcagaacctgcttgctcaagttcagccccttggtgaggctccggacgctgccactctcccagcctgccttgtctggagtttctccaggctgagctgccccaggtgccagccctcagaggggaggtctgaggtgcagcctggctaatgattaacatacgctacagctattttagttcctggcatgtgggtggggagttgaatgcttaacagcacctgtgtaggctttttgtttagtgcctgggaaaatatggtcagggttggtggagtgctgccctgaggctggctggctggcttcggtgacttaatggcacctgtgaccagcaagggcaggacattggggctctggagtgcacgcccagggcccccacccccttctcagtagagctggagatgttcatactcccactcacatcacttaaggtcctgccttgaggtgggggagagaggggaatgtcctagatgtgtcctccctgcccccagaattcctggggcctacgtaatagaggctaccgaaacaggtgccacccagagagtgaaagaaatgagtcagagtccaccggggttcctgccagtattcagtatgtgtcaagggcctcacagtgccagccctgtggcaggtggtggtgggggacaggaagagaggcctgtcctacagcctgtagcactgatgctctcatggggaggcctagaaaaaaagtgtctggctctggcacttgggtgtgtgacctttgcatgtcaagagtcagctcagccttcgttcccttgcttataaaatgaggatgataatacctatccaataggagcattgtggaggttaatgaggtaatatatagggatgtaatatatgtatctatcctaggagttagaaaaaggagagcttattagaacattagagaacatggaaaacattttaggacaagtgctgtgagagttccaagaagagtgagcattgtggataggagatcagggtgggcttcctgaaagagatatggtatggtttggctgtgtccccacccaaatctcgaattccctcgtgttgtagaagagacttggtgggaggtaactgaatggggcaggtctttcctgtgctattctcgtgatagtgaataagtctcacaagatctgatgcttttataaagggaaatttccctgcacaaactctcttctcttgtctgctgccatgtgagacgtgcctttcaccttcagccatgattgtgaggcctccccagccacgtggaactgtgagtccattaaacctctttcttttgtaaattgcccagtcttggttatgtctttatcagcagtgtgaaaatggactaatacaaggtggaacttcatctggactcagggaaggccaggagacaggaggtcagaccagctagagggaccacctaagcagaggtgtcctgaaaagggaaagtgctgagctgggctgggctaaggacatgcattttttgtgcttctctccatcatgcatgtccctgaggtaccttctgttttcatgctgttcctcagtggcccagtgtgagtgactcttggctccagactgcttgacacagcttaggatgccagctgcagaagggtcagcccattcccaagtgaaggtgttttctcctccagagtgagctgcaggtccttgaacttccagttgcatgcggctgactggggacattgtcaccatctgaagagcagaccttgataagggatatttggaaaggtttcctgaggcttctaggtagagcaggggtgctcagccatttggagctggaatatacactctgttaagtctcccaggcttgaaggggctgggcttccagagtggtttgaacaggccccgaggactggctgatgggcatcagggcctttccgggagaggctgggggacacactgctgccatcacactcttcagtcttcttcgcctctcttcctcagcctgtggtgagagacgggtctgtgccggccattcataaggagatgagatggctcataacacaccaactggaagggccctggtaaacctctactcctgtgatcacaaatgcagattcctgcaaggacagcccggcagctgaaggagggagggaggtgcgcagctgttgccagccctagccgagtgtcaccatgcagaaatatggggcccttgttgccagagctcctgttttaatatttttgaaggatttaagccagagtctcccttttgcagccctttcctccctccaatgaaataatgctattgagctccaaaaccttcaggagccccaggttctgggaggcagcatgcaaaccactgaggccctgcaggcgcactcattgaaaataggtgaggtagacgaggctgggagggcttagatttgccaaggcccctcagagagaagccagtttctcagacgcccctatgctccactgccagggaacacattttctgaattctttgtcttccccccccgactcttcctaggagtggctcttaaatattgtagtgtgtgtttccctggaagtgcgctattgtgtttatctcgctagctagagggaaagcatgatgcaggccaggactttatttttttcttccctatcctagggggtgtagcccagcccctggtgcctccataaacccaggtgggattgctgtgaagctaatgaagtggaagcttcaggtccccggacttgtagcaccctagtgaggggccgtgggaggggcactagcagtgagttcacagagtcatatggtttataacatttgcaaaaaactaagattttttgtattctttgtcctgaagagggttcctaaaattgtataagcttcaggccccacaaaacctggacctactgcagatgttggtaccagtctcacagactggctgctagtgttttattttaactttcccctaaaaaatatatgcctgttttttcagaaagcagttgaagaatatagttcaccaggctggtcaacatggcgaaaccctgtctctactaaaaatacagaaattagctgggcgtggtggcgcatgcctataatcccagctacttgggaggctgaggctgcagtgagtcgagattgcaccactgcattccagcctgggtgacagagcaagagacttcttcaaaaaaataaaaaagaagaagaatgtagtaatattctgtctttttttttttttttttgagacagagtctccctctgttgcccaagctggagtgcagtggcacgatcttggctcactgcagccccagcctcccgagtaggtgggagtataggcatgcgccaccacgccagactactttctgtatttttagtagagacggggttttgacatgtttgccaggctggtctcgaactcctggcctcaagtgatctgcctgcctcagcctcccaaagtgctgggattacagatgtgagccattgcgcctggcagaagtaatgttctctttctaaagttagatgataaaggatgcttattttattgtgctttataattcatatatatgttgtatttattgctatattgtaaaaatattttataataatacacgaaaaaagccaaatatgttgatccaaaaggcttataatgaagccagcagtcccctgacacatccttcctctttccctttctccagagttaatcatttttaactatttttaattaataggcttatatgactgtttcttaatttatcagttttgaaatatgttgacttcctgcttggtagattaggaaccaatacatacatcaatatttaatgtatgcattattgtgaccataaattgtattgttcgatgctgtgcaagtaatgtgccgtggtcacacattaggagtacaatccttcctgtcccaatattcctcaggtggatgctttccctccttgggggcctgattttctgtgtatctattgttccaaactggtctggttgctccgcaggcctgctgctcagctgttgtcccgggacttctttttacagtcttctgtgttagattctcctattcctagatcctatatattttattttctttattttccttatttatgtctcattttgctgaaatcatccagaagttcctaagaaaagtgcatgggaggtagattttgttttgttttttgtttttgaagcttgtgtgcctgcaaatatctctattcctccctaatggatagaaatatccattccaaatatctctatccagtagtggataatttagctggctatagaattataagctgaaaataatttcctttctgaacactgaacacattattctgttatcttctagtttctagtgtggctgttgaagtccagtgtccttccagttcccctgaaaaggacccttgttctttcttttctaaagttttagtatcttctgcctcttctcttctcaaatttcacaatgattgctttgctgatctttttgctttgtggatataacattttctcttccgtctctaaggatattattgattatatttttgtcctctatttctcatcattgtctgtttctttggttctcttctatctctgaggatattattgattatatttttgtcctctacttctcatcgttgtctgtttctttggttccttttcttctgttttggtctctccctttcttggtgtagactttctcagatgtcctgtgaccctttgctgtctatatgaagagggagaccataaaaatctgattagagtgcataggtgaaatgtacaggaggggcaggattttatcacatctcttcccccttcggtgtgtttcctggaaggcagttattccccaatattgcaaaattaatctctcctcagcgctggtcttcccactgtacctgctgttgcctcgggcaggaagcagcaacccaggcttgaactcccatgggctgcccccgtgatggaacaaaaagaatcatcctagagaactgggcctgagtccgccagcagctctgaggacaggaagcctctctacccaccctgccctggggacgatgagctctagcctgggagtgggggattcagcaccagccctcttagggtcttgctgtatcaccttggcatgccacaaccctctctctggttgtcagtgtgaccatttgtgaaatggggtgaggtggggtcggtgggagtgaactgagtcgtctctgaggtgctgagctggcctctggcatccggttgtgaggtcctggctgatggggtgtgatggccctgcctgtgcaaatccgactgggcaaatgctgactgggcatgcgtagcctggccacacggaagccactgagggcccaagtcccctggtgactcatgttgattggtaattcaagttagcacacctgtgccgagcctgttcccgacacatgggagaggcgagcacctggttcctccttgtgccgttggaaagggttttttttgtagtcttggtggtttaatatttcccttgttgaagaaagctggctgagttaggtagacatgttcacagagctcttatgcaaagagaacagaggcctttggaaagagaatgccatagaaggatctggaaggaaagagaaggaatggtcactgtatatattagttttctttaaagttttttttgttgttgtttgtttttgttttttgagacagagtctcactctgtcacccaggccggagtgcagtagcacaatctcggctcactgcaacctgtagctcctgggtttaagcaattcctgagtagctgggactacaggcacgtgccaccatgcctggctaatttttgaattttaattttattttattttgagacagaggtttgctctttttgcccaggctggagtgcaatggcatgatctcggctcactgcagcctccacctcccgggttcaagtaattctcctgcctcagcctctcgagtagctgggattgcaggtgcatgccaccacacccagctaattttgtatttttagtagagatggggttttgccatgttggccaggctggtctcaagctcctgacctcaggtgatccgcctgcctcagcctcccagagtgcttggattataggcatgagtctctgtgcctggccaatttttgtatttttagtagagacagggtctcactatgttgcccaggctggtctcaaactcctggcctcatgcagtccgcccaccttggccttccaaagtgctggggttacaggcgtgagccaccgtgcctggccaatagttttctttaaaaattttttggccaggcgtggtggctcacgcctgtaaccccagcactttgggaggccaaggcaggcggatcacgaggtcaggagatcgagaccatcttggctgacatggtgaaaccctgtctctactaaaaatacaaaaaactagctgggcgcggtggcgggcgcctgtgatcccagctactcaggaggctgaggcgggagaacggcatgaactcaggaggtggagcttgcagtgagccaagatagggctactgcagtccggcctgggcaaaagagcgagactccgtctcaaaaaaaaaaaaaaaaaaatttattgtaaattaacatttataattatgtaaatttatggagtacaaagtgatgttataatctatgaatacaatgtgaaataaagcaaactagttaatatatccatcacctcaaatagttttcaataattagttttcaattactgctgtaacaaattaccacaaacttgtggcttaaaaccatgcaactctttttgtggtaaaaatatacacaacgtaaaatttaccattttacccactgttaggtgtgcagttcagtggtgttaaatacattcacttcgttgtgcaacagtcattacgatgcatctccagaaggttctcatcttcccaaactgactctgtactcaggaaatgtaaactccccattccctcttacctgagccctggccaacagcagtctactttctgtccttaggaatttgactcctttggagacttcatataggtggaatcagaagtatttgttcttttgtgcctggcttgtttcatttagcataatgtgttgaagatttatccacattgtagcatatgtcagttttcttctgttttgaggctgaatgatattctctttttatgtggagatcttgttttgtttatccattcatccatcaatgggcacttgagttgtttccaccttttgactactgtgaatgaggctgctatgaacatgggtatacaaatgtctgttggagtccctgctttcatttcctttaggtatataggttgagtatcccaaatctgaaatgttccaaagtccgaaactttgtgagctccaacatgacgctcaaaggaagtgctcattgaagcattttggattttggatttttggattttggatacacaatggtaagtatgatgccagtattccaaaatctgaagtcatctggtctgaagaccacaatgtctgaaacattgctgatcccacacattttgaatgagaggtactcggcctgtatgcccaggagtgagattgctggatcgtatggtagttctatgtttaattttttgaggaatctccatactgttttccatagtggctgcactattttaccacatggtttttttatctttacagttttatctcagggtcttttggatctcatggtgctaaaatgaaggtgttggcagggttgtgtctttgtctggtggccctagaggtgaatgcttccttgccctttccagctttagaggccatttgagttccgtggcacttggcccttttcctccatgggtggaatccctctcatgcttggactctgtccttcttattcttccttttcatccttaacccagcaacaaaggctctctgctttgaaggacgcttctcactggattgggcccacccggataatctaggctagtctccccatttcatggcgggtaaccctaatcacctcaggacagtcccttttgccacctaaagtaacgcattcacaggtaccggggatgtctttgagggacctaatcagagaagctgatggtagctgagtttcaggctctgaaaagccctccctctacccctccccttaccagcattttcctgaggccccgggaccctaagggttggctggacactcccctcactgtgtgggctgggctggtcccctggcgggagcctgacacctgagtttagtgtgtgcccaggatctgtgacccttttctccctctcgaaatgtcagagcctggcttctttggccactaggcgtgttggtcacagagtgaagataactgtgtcctgctttacaaagcgcgttcctgttctttttacttttagtcctcatagtaatccaaggtaggtggggtacatcaggtctttgcagatagaatggaggttcggagaggttaagttgcccaggggggtcacacagcaagcagttgcgttaggaaccagaccttggctccaggctaatgcctcctagggactaagttaaaattaactgagcacctgctgtgtgctaatacctgttgtagtgctatatatatatatatatatatatatatatatgtgagaatactacattctcacagctgtgtaatgagatggatgcatttttcctcttttcacaggtgaggagaaaggctcagagtggtcaatctatatatccagggtcacacagctaacaagaggtagagctagaatggaatcattgtcactggactccaaaccctgtgtaccatcccagtggcctagcagcagtgttagaagatgatatcagagctgtgtgggctgcggtaaaactcatgcagcagaattgagaagtcccttgtgactgtcctgtgatgtttggggcccttgacgggggagtgtgggccgtgaaaagatgggggagctggtttagagtgtgtgagagagagtaattgggggtggtagaagcctgccaagaatctaggggtagacattgtgaaagccaatgtcagtgaggctcaggcccagtgtcttggagctgcagagcttccctttacctcccactgcaaaatgagggaagggtttagagaagtttctgcttccttccggcagagctgctgcaagggttgtcttgtagatagtaactaccacaggacttggggtgtggcacatccctgtgggcccaggagatctgggagaagctgggttggactttgcagtaactggagtgacctgacagctaagaggggtgggattgacagggaagcctcagccaccctgggacttgtgcccaattgacatcagctcactaccattgttttgctggtccctcctaggcgggccctggcagaagctccctctgctcaggtggtgtaactggcggtggcttccccttgcggaagtgggtaaacaaagacagagacctgtgtctcctccccgcccctgccacctgcacttataaacacaacccactgtttccctttttgggagtgtgtgagagagagagagagtgtgtgtgtgtgtgtgtgtgtgtgcacgcgcgcacatgcgcgtgcatccttaggttccgtctaaatccgttcaagctgctgtaataaaatatcatagaccgggtggcttataaacaacagaagtacattgctcacagttctggaggctggaagttgaagatgaaggtgccagcagactcagtgtctggtgagggcccactttctggttcacaaataggatagcaccttctccctgtgtccccacatggtggaaagggttgggccctctgggatctcttttataaggccatgaatcccattcatgaggactccaacctcataaccttccagaggccccgcctccaaatgtcatcacactgggagttgggatttcaataaatgaattttggggagacagaagtattcaaactatagcaggtcctggccacactttggagtcaggacttgggtggggggctttttctgtcactgccactgtgtctgttgcaagaacctcagcgtcctccaggacctgagtgcccatcacgtgctggcctgcgaggcagccagatattagcactgtgtctctgtcactttcttcctctgctgcccactttccactcctcagaaattctgaattggactcagcatttgactgagcattggctcttatgtgagcctgtttggtgtgggcaggcctcagaggtgactctgcccacaaagaggagtggcctggcttccagggaagcctgccatggaggagcgtgacggagagatctgcgtgtgacgctgtgtgctctcggtctgcgttgtatggaaagtgagttcctcctcacttgcccccatcccccttctcagcacctggtctggagaggcaggcaggaggagagaagatggccccatccatgccacacctcagtgaaaattctgaggacaggctctggtgcccgcagggttggagcttcatgcaggctgaggccctgcctctgcgggtccctctcccaggcaggtttactctccgagggtctttcatatctccctgcccggtggcctccctccaccatcagtcttgccttcgctgtcccctctactcttggagtggagcaggcccccatacacccaggcacgtggaggggatggaaagaaaacagcgccaatttcctgttggtgctttctctattgggaggctggaaaatccaacacagccatgccagtgtgctccccactcccatcctccacctgtcacactgccctgaccctccccagttccgtgtttctctcctacccccctccttcccccttcagtccccacagttctcatcctgggcattatcaaatagcccagggtcctctctttcttattttgttttggagaaacaggatgtcatgatatgttacatgatataatgggaacaaacttggtattaaactgttaatatccccattttacagatggggaaaactgaggtgcagaaaggtctcgtaaactgtcaagatcgcgttgctggtggggagcaggactaggatgtgaacctgggtagtctggcttcagagtctgtgttcttctcaccatcctccattgcctttaatgaagtactttaatgaagtacctttaatgaagtatgtaatgaagtttcatacagtgaaaccggacttagaagccaggtatcctgattctgaattccatgctatttcatcataccagtgtttctaaagctctgttcttaaaatactagtccctggggccagtgggctctgtgaggaagtatagtgtagtggtaaagtctgggctttggaagcagactgcctggctcagccattcaatagctataaccttgagcaagttacacagcctctctgtccctcagtcttcatttctgatatgagaaggataattttagtatttgcctcatagggttgttataaagttcagttccgtgtgaagcacttaacagtgcctggcacatagtaagcatttaataaatggtaactactattatggcctaattagtttgggaaatttgaggatagagttaagcaggcacttttgttacaggatttatcagagcttttattacgctgttgcaaattggcagtttcctggaaaggggatgtgtagttatagtacataactatatgtagtaagcattttctaaacttttcgggcaactaatctcttgctcttgtctgcctgtctcgctccttaaactgcgtgccttctaacttcacaacttgtaagatatgaagctggtgtcagggaacacattccgggcagcactgagctgcccatcactctatctgcttctaagtgaggctgagctaggcctgggcatcccggttagatctgagcaagacttctgggggcagtagatggtaggtgttcagaagcaaacagacttatagtgaaaatgaacaagctgtccatcagttgactgtcatgcaccaggtgggttctgctctacagaaggccaaaatgcatattgtgggagtgtgatgtccttgctgagatccttggatttataagtgtttattatgctgttccttgccctgcaggccaaatacatcctatttgatacttaaataatctcaggagccaatgaaggaagaggttataaaggagaaaattgactaactggcaaagcagaggccagtccccagaactccatccattcttccactcaagctgcatttatgaggtgcacattcagccagatgctggggtaacagtggtaaacaaggctgtgggactgcatttttgactctggaaaacatttgcagatggttggcagcatcaccactaggtagagctcagtggtcctggaagagtcctggggaggttggttttctggccctcttgtattgacaagtgccccctcaagcattccaagctcatactcttcctaaggtgaatcagcacctgagtcttttgctgatgtagaagcctgatctcaacttagagtcccagctgtattatagttatataaacacactgtctgtctgtctgtctctctctctcgtattagttatataaacacactctctgtctctctctcacacacacacacggtccctgactcaagatggttgaacttacagtttttcaactttatgatggggttacatcactttcagaagggatgtaaccagctcctccacttttgatggggttacaatgaggctacggtttttattgagtgcatgtcactcttgcaccatcataaagttgaaaaatcataagtcgaaccatcataagttggggactgctgtgttgccagcattaaatgcattttcaactcatgatggctttatttggatgtaaccctatcataagtcaaggagcatctgtatgtatttatatttaaagttcctaacatttagagatatgaacagttacagatgaaataatatatgatgtctgggatttgcttcaaaacaatacaggggtgtgggtggggttcgggatgaatcaagatgggccttgaggtgataattgttgaagctgagggatgatggtttattaaactgttctgttttatatatgtgctccataacaaaactttgtgaaaaaagtcgaccattattaatcaccgcctctgtgattaatggattaattaggattgtggctcactccatggaattccacagccacagttaggtacatggtcccctggggccagctcctgccactgaaggggtgtgtggggcagagcttgggctctatctgccttccctcgtcttcatagttatgggggaactgtgagctgatgcactgagggtttctggaaccttctggctgtgaggagtggccttggcagacccttgtttaaagcatgcttattgcactgtctccttttgcccttggaggaggggtcttcaagtaggttgccaagggcagggcccactgggaccaccagtgaagccagctcagcttggacagaagtggcacacgttttgcaatgcagcactgtgaggggatgtcaggttttgtcgtcagctgcctgcaggccaagctctaccatggaccctctccgccacacccgtgtgatgtgagcaagccatgtccctggtgtattttagctgcaaagctgaggaagttagaacatgatcccttccaatgtggacattttgtgagtctgtaagtctaggatttggggtgaaagctgaaagaggcccccttcagaaatcctgagatcccagaggaaggaaggacctcaaaaagggttgcccctggttttgcccatgggtcaagtgaggtctgggagaggaggcctggcctcaggttgctggctgagatccttttctggctgagatccttggaacaggactaccgtagtagacgtttctgcctcgtcttagaccttccatcttgagttctgggctccaggcccttgtctgcaccttgctctagcctggtgcctccctctctcctgcccagtgacctgggacgagtgcctagccactcacagggcactgtgtggaggtcgtgagccactcacatcagctcagggctaagtaagtcttcatttccccagcccatgccaggaggggcaccaggtcggaatgtgaactaagaaggaaaactccaagcaaaactctcaacacttcaccctgcgaccagatgtgtgttttttttccccacactgaccaattctctgactctaactgggtgtcctataatgcagctcaattctgaccctaactggagtcactgcagaccctataggttaaagggctcagtcccacaagactgccagatatatatttcttatatcacattatcacctgagacattacttaaccagagccgagccttctcccggagtgaagagagtttgcagatgcgtcagtttctttcctcttttaaaaaaattatgtacatatatggggaatgggaggccaagggagggagagcattaggacaaatacctaatgcatgcggggttcaaaacctaggtaacaggttgataggtgcagcaaaccaccatggcacatgtataactatgtaacaaacctgcatgttctgcacatgtatcccagaacttaaagccaaaacaaaatgtacatatatctgagcatgtataaacacatatgcatatacatttatatatttatgtaaatatatatacatgtattatacatttctgtgtgttttaaactgtacgttgaaaactgcttggtggtgacctttgtgtacaaggatagagggaagaatgcttgcttttcattttgtgtgtttctattctgtttgaatttccctacagtgtgcttgtattccttttatttgttaaataaaatttattttttagagtggttatagatttacagcaaaattaagtggaaaccacagagtttccctgtccccctgcccccacacttgcaccccccgccattagcactcccaccacagtggtatattgttacaatcagggaagcaacatcgatccacctattcattctttcctcccctgacctctggcaactactcatctttttgctgtcaccatagttgctttctccagaatatcgtagagttagaattatacagtgtgtaaccttgggtgcttccaaattgttggccattatgaataacactactgtgaatgtccatgagcaggttttgtgtgcggcagaagttttcaacttatttgggtaaataccaagagcatgattgctggatcattggtaaaactatgtttagttttgtaagaaaccaccaaactgtcttccaaagtgcctataccgctttacatccccaccagcgatgaatgaaagttcccgttgctctgtatcctcaccagcatttggtgttatcagtgttttggattttggccattctaataggtgtatagtagtatcttattgttttcatttgcaatttattaatgacatgttgagcgtcttttcatatgcttatttgccaccttatatcctctttggtgaagtgtctgttcaggtcttttgcctattttttaaatcgtaaggttttcttgttgagatttaagagttctttgtatattttggataatagtccctttatcagatatgtcttttgcatttattttctcccattctatggcttgtttttccttcctttcattttattttatttatttattttttatttttttgagacagggtttcacttccatcgcccaggctggagtgcaatggcgtgatctgggctcactgcaacctccacctcccaggctcaaatgattctcctgcctcagcctcctgagtagagtagctgggaccacagtcgcatgccatggtgctcggctaatttttttgtattttatttttgtaacgacagggtctcattatgttgcccaggctggtgtcaaacttctgagctcaaatgatctgcctgcgtcagcctcccaaagtgctgggattataggcatgggccactgtgcctggcctcatcttgtcattttaaagaatatatcagcagggattattggacctgcctggtttaaactattgtcttagttaattttgtgctgctctaacaaaatatcacagactgagtaatttataagcaatagtagcttatttggctcacagttctggaggctgagaagatcgtgaggctgcatctggcaagggccttcttgctgcttcataacatggcagaagacatcatgcgggtaagagagagcatgttatacttttgtaacaaacacactggtggtaaggagcccacttcctccataacacattaatccattcgtgagggtagagcctcttaaaagtaccgcctctcagaactgttgtattgaccattaagtttgcagcacatgaactttgggggatacatttaaacaatagcaatgatatatttaaattttatggatacaaccttatggggaaagtattttaaaaaataaattgtgtgtgtgtgtgtaaaaacaggttaaggatctaatgttaaaaaaaaaaaaaactaatatacaaatcaatattccagccaccagactggggaaggccagtggaaaatcactccatgaaagcatccactgtagtcccggtctgcttggtttgctgttaggccctgaggggcagggggtgtcactgctgtgtggcttctggcccgagatgatgtttctaggcccttgcctctcagcattaacctggtgtaggctctgttcccaaatgagccctgtgttgtctttctggggaggacagtccagagtcccaggcatggcactgacaccatccacccctcctttcccttctgtatccctgaagtcaggcaggacaccagcaaatgtgcatggcctagccttgctggtggctggagcccatatctccacctccaattgttgggtagagacacagcaaggcttcccttttggtagggggatgactgagtcggggcagtgaggctcttcttgctctggcagttgcctcctgtcccagtgtagcatttctagattcctgtgttaggggactccagctagtacccttttagagcctgtggagttgaatggtacacttacgtacacgtaacatggctttagggaacaggccattttgcagccactgagaagcacccccagatagctgctctatgcttttggcattcaccagacgctttgaggctggcttctgatgcagtgctgtcatgccagactcctgtcaactttaatagggatggcaccatgtttgagaggccgaagaagagacccagagccaacgaacaaggcatagggcttattgaggggacttacatatggggcggtccagtggcagcaggctggatggaaggaccactactatttgtaaaaagcatgcagtttgtatagcattttaatttagcatcctccttcctaaccacctccacctggcaaccttcatttaacgcagaacaaagggccttgatctcctgtatggccatggaatggcttaggggttctgatgttccttatagataaggaatggatctccaggttggccacagttcctcagctcagaactctgaacacacattcttcttagactatagggtcgttctgggtatgcttaagtgattgctgtcaggtgcatctgtcatacaactgtgggggtgcctaggtctagtctgtgtccctagagcttactattgtgaagaagagtatattcgtccattctcacacgactataaagaaatatctgaaactgggtaatttataaagaaaagaggtttaattggctcacagttctgcaggctgggcctatgccaggttgaagggcccagaatatgggagccaaggtaccagcatttttagccagctctccaagtgagggaaagcatgatgctggcatctgcttggggaggcctcaggaaacttacaatcatgtggcaggcagatcttaacctggctggagcaggaggaagagaggtgtggggaggaggcgctacacgcttttaaacaaccagatctcaccagaaccctatcatgagaacagcaccaaagggggaaatctgcccccatgatccagtcagctcccacctggccccacctccaatgctgggaattacaattcgattgtattgtaattagaaattacaatttgggcagggacacaaatccaaaccatgtcaaagagtgagatcagatgagctagagagtgtccaataccttaagggaaagagtgtttcctagagtgtggaccacagaaccagttacatcagaattactggggactggggggtatgtatgcttgtttacacttcagattcctgggcctatcccaggttagaaggcccagaatatgggggctagggcgctagcatgtttagtgagctctccaggtgattatcatgcatgatgaagcagtgtggcctgcaggcaggcagcatcagcatcacctgggagccactggaaatgcaactttttgggccctgccccagagacactgattcaaagactctggaggtggggcccagcaatctgtgttttaacaagccctataggggactgttttccagaagcaccgatttaactggagagggccccagctggatgaaatcaggtgcacagctgcaggtggatggtcgcagtgaggaaggaagggcggtatttgtgctgcagcctgccctgagaggcaggaccagaggccagaaggtccccagagacaggtttctaagaattggacccatccttaaggaggccagctgcctgctgtgtgcaggaggccctctccagtgagtccccatgtcagagggccgtgattagaagcaggcgtagagcgggggacatgccccagccatcagaattgcaccagcagtgtgaagcatgtctcttgccccatgcaaggaaaggaggagagaggcattggtcagggtgaaaggtatgattctcatggatgccagagagagagagagagagagagagcagatcttctggattatagctcactgtgttgcctctctcctggggagtgggtgctggacaggctagggagggggacccgagggccttagaagtcttgccgagcccagatatggcagccctggggtgccaggaacgacttctccaaggacagccccttgcggtagcctcttttgaaaaaatgcagaggtcacagttaccagaagactggaccatgagcagatttcttaattttcaaagaaaaggaggagaagaatgctgcttctgtgagtcagagagcagtgtgctaatcctgcagcctctagcctcctagaacatggatagcttggggggagattggtcagcgctgggagcctgtgtccacctgaaggtcacccctggctattgggctgcgtttacttttctcctgggggtaattaggcagataaacaggctctcttcagagtaaatgtgctagaaccctcacttgggcatgtggagaaatgtgtactgggtggtggcagagtgagttgggggagagctggttaaatgcctgcacccacatgatgcctagtgtttgatgttgaactggggagttctgagtatgacagttctgtagtgtccctcgttgtccctttcgtcttggttacttggcagaacacaaatgccatgcttattgcatccatggatgtaaaacaaagctgagagagagggggaagatgtttgatgttgagcagaatcccagaaggtctcaggagactggagcaatgggcagaacccaggggagaaatttcacaggagcccacataaggtctccgtggcctgaaaacccacttgtaccagtccggggaggtagggagtagcatccactggagggagatgaaggtcccgccctgcactcttcagaccatacctggggcgtttggtcctgaaaagaactaaaagataagagtggggtcaggccaggcatgtaatcccagaactttgggaggctgaggcgggcggatcatctgaggttgggagttcgagaccagcctggccaacatagtgaaactctgtctctactaaaaatacaaaaatcagcctggtgtggtggcaggtgcctcaggtgcctgtagtcccagctacttgggaggctagggcaggagaattgcttgcaccgaggaggtggaggttgcagtgagctgagattgcgccactgcactgcagcctgggtgacacagtgagactccgtctcaaaaaaaaaaaaaaaagtggggagcaggcttgaaactatttcaggcagagaatgacagagggaaaaatgaggctattctttctaagaacggaggactagaggtatatcttggggagaggggaagacccagggtcgcaggaccacagctcacagtggggtcgacctgccctgtggggccatgcagggcagagctcctagccaggaggcagattttgactcctgctgggaactcccttaaaagccaccccaagaatgagctccacgagcgccatcaaggctggcctgcaggccctccagggttaccaaggctgcctggaactgaatggaccctgtgtgtgttcttttagtcttggaagaccagccaggactttgggggccagacggctagcctcaagtgagctcagaaatctgcacctgaattgggcctttttaaaagttgtttaatggccaatacatacatgcagcagaaatgcacagggaacagatctaaaccggaagcctcattttctagccccacctttcctctcgagaggcagctagtgttagctagtttcttgtgtgtcattccaaggatgtccgtgcacgtctacactcaggaaccacttagtttgtatgtttctgggttttttattagcttagtacatacacagtactgcaccttgattaataatggtggtcattgcatctttccatatacagagctggctaaatccagaaatagctacagagtatccattgttggatctgttgtggtttatttaaccagcctcattggtggaggtttaggagttgttgcagataaggctgtagtaaaattcatgtctgtatgacatttcacacaggtgtgtgtctggggaagagacttacagaagtggagttgctgagtcaaaggtatgtcattttaagttttgatatctttgtattttatttatttatttattttggagacggagtctcgctctgtcacccaggctggagtgcagtggcataatcttggctcactgcaacttccgcctcccaggttccagccattctcctgcctcagcctcccgagtagctggtattacaggcacccaccaccacgcctggctaatttttgtatttttagtagagacagtgtttcaccatggccaggctggtctcgaactcctgacctcaggtgatctgcccacctcggcctcccaaagtgctgggattacaggcatgagccactgcgcccagccgacatctgtgtatttttaattggtgatttcctcagcacattggtgaaggtgagcatcttcagctccttttctgtaactgccagatctgttcacatcatttgacagtttctctagtggttattgatctttttcttattatattaataaaacttttttcctaagtttttttctcatctttatttttttttaatttgtctcttatgctgaaattttatttatgtcgttggtttttggggctacttctttcactgcattatttggcctggctggaatttacttggtataaggaacagggtggtatccagcttctgtttcttgggttttttccctggcctggctgtggatggagcttttggcttcatttctctgagaggaggccaggagtggagagtgtctttggtgctcaaaggtcctgcctagtggtgtctccagagaggaaggtgacagagacaccatcccggctcttcctgctcacctgtcgggcagttccttctattagaaggttcctggcctactggtcatttacatcccccagattacctcctcaccagtgaagtctgagggtttggcagagtctgggcagaagggtcaggctggggccgggacggggagggctttgtactgacagcccacccagcctcagggacaccctctctgaaggtgatgccaccggggacctcatccaccacgtgcttaggggctcagagagaccgaaaactgcaaggagtaggtccttggtccacactacagggagccaattccagctttctccaaagccatagggctttgcctacggtcacctctggacccactgacccaaacaaatgactacacccgtagggctgaaaaccaggcccaccctatggggaccggtggtaccttaaggaagttctttagcttccttaaaaacagcatgtaggctgggcacagtggctcatgcctgtaatcccagcactgtgggaggccgcagcgggcagatcacttgaggccaggagttcagaccagcctggccaacatggcgaaactccatctctactaaaaatacaaaaattagccagggatggttgcgccctcctgttggaggctgaggcacaagaatcccttgatcccaggaggcggaggttacagtgagctgagctcgcaccactgcactccagcctgggtgatagagtgagacgctgtttaaaaaataaaagtaggccaggcatggtggctcatgcctgtaatcttaacactttgggaagccgaggcaggcagatcacctgaggtcaggagttcgagaccagcctggccaacatggtgaaaccctgtctctgctaaaaatacaaaaattagccagacatgatggcgggcgcctgtaatcctagctacttgggaggctgaggcaggagaatcacttgaacccaggaggcagaggttgcagtgagccgagatcacaccattgcactccagcctgggttacagagtgagaccctgtctcaaaaaaataaaaataaataataaaaaaacttaaaaagaacagcatataccagcctcggcaacatagtaagactctcaaaaaaaaaaattagctgtgtgtggtggcacatgtctttaggaggctgaggcgggaggattacctgagcccaggaggtccaggctgcagtgagccatgattgtgccagtgcactccagtctgggtgacagagcgagaccctgtctcaaacaaacaaaacccaatatgcccagttcttcaagatagatatgaagggcagctagactcttatagttggatagcgtggctagaacagtggtcttcaaagtgagttccctggaccagtaacatcatctggaaacttgttccaaatgcaaaaactggttccactgtctcagaaactcttggtggtggagcccagcaatgtgttttaacaatcccatcaggtgattctgatatgcattgcagcgtgaaacccagtgtgtaaaaagaagccacatactcgagacgagcaggtgtgattgttgagggaccctgcaggtttcctcacatgtccgcctgccattgggtgtctctgcagactgcagcagcagctgctattagcaagagcaggcaggttgcacaatgtggctggtgtcacagcagatctgtgtccctcctcacaatttaactggcaggggacattgccaagggatccgtgttcagagggacttcgtgagagcaggtgtctcacctggcacctgtccaggctgctcttcctcccttactgacagatctgcaaatcacttacttctcttaatcagcagcctctactgcagaaacagggtgatgctgcctcatttgccctggttcttcaccctgcatcagatgaacctcctgagggccctttttgcttctaggaacgatgattccataccttaccaggtccccttgcctgatgaaccagaggttggagaatgaagagagacaggggcctctgacttcccctgttgctggagggatggcaataaggacacaggaagataaatagacagacctggagtcctgagaatgaggcagtgcgtctctacctctgaggtgggagaacaggcccagaggcgcactgcacccttgccagcagaggcaggagcaaagcttcagtgagagggcctttcaaggaaactggctcatggggagtgaatcctgtcactgtgggtggggccgggggtgtggccctggcccagaagtcaggcagcatgctggtgggtactgtttctagctggaggcaccagcaggagacagtgaactggtctgcgacaagcagggcagatgcagcagtttcttctgcagggtcccagttgtggtggtggctgccctttcaagaagctgggtcccacgggccagcaggggctctcaggcagagcctgaatgtgctttcgtcttctcttccagatctaaccatgagctaccctggctatcccccgcccccaggtggctacccaccagctgcaccaggtaagagggtctggggtggggaggagagtgaatgctgcctctgtacagtggctgggagtggagaggggagaacagtagtttcctcactcccctcctcccctcacagcacggcccagcaggggaggagaggacaacaggagtagtgggacagccagccgaggcaggggctggagaagagcatgacactaaggccatcggaggcctaggtttgaaactgcctccagaaagccctggaccaggcccagggctgggtctcttgccttactctctagtaacagtgggcaaatgctgtcactttgagactcagttttcttctccgcaaaattgcttcaaggatttctccctcattaggtggtcctggatactgatgagataggcaggcagagcgacacggtgtcctccaaagcattgctaggtgatggttgccccttaccacctctcctaccctctgctcaaggtgtgtgggtttgcagcaacaagatcccccttgccaagagaggaagtggaggcagatgctaagggtcaaaggtcactccctgttttctgcaggagctgtgggtagtcacatggagaagtcgtcttctctggccctggccccttttggtcctcaaatgagatttggtccccactgtgggaaaggaaatatgagggctcatgagaccaaggggagaaaagggtcattccaaggctggtcatcctgagggtgcctgagccgctgcccctctccccaggggactcctaggcatcattgatttctttggagctgaggtcctgtggtttgaacaccccagacctgcaggccatttaccttccctcccattcagcaggtgaagaacagactcagacctagaggtggctcagctgctgtcccagggcatgttaggggctgagctgggccactgccctctgaatgagcccaccccaggttggctggcactggcctgggttctctctctatagtagaaatcctgccatccagatcctgccactgccacctttgctagcacagctgagcagcctctgagcagcaagagaggaggaggcaggaaatttagggaaggttcttcctggagggtctggagccctggagatgaagagccgatccgaagctgccatgtagaggaaagcatctaacaggccagaggccccatgatgatgtcgaatgcccatcgggcacccagctgagccctgcaggtgttaactcagtcttcgtcacagcagtctaggcatacactcaccattagcccatttgtaagctgaggaaacaagcctaaggagggtgaaagccttgccccagggcacataccggtcctgctggtttcagagcgggcttttcacctctgtttcttcctgtcctcttgtggactggtatctgtgtttaccatgacccagccccatgtccctccagcctcttatcctgcttctccctgccttttacagacttgtaatagcaaacagccaaaccccctcccgccagtgccttcgcattactgaaatctcagagctccctatggtcacctctgtcatgggctcagcatggtgtcccacaacagtctgtccttgtctgtcctcctgctccatgatggtgaacttgggagggcagagcctgcctgggctctcccagcctccttaataccccacagagggtcttgggagtgtttggggaactccaccttcctccctgggaagaggggaaggtttcccctcctctgccagtgggatagggggagactttcctcctggtgttttcatgtggtctgtggtgtcccgaggctcgaggctcgaggctttactgggcctccctttctgaccacctgggagctctcatctctgcctttccccgtgtggtgggggactggcagggggctaaagggcttggtgttgctttcaggtggtggtccctggggaggtgctgcctaccctcctccgcccagcatgccccccatcgggctggataacgtggccacctatgcggggcagttcaaccaggactatctctcgggaatggtgagtccagctctcctgctgaggcagccctggggccacacctgcgtggccagaggaatcaaagctgctggcctctggggctccagagttgtctatgtgtgtgttgctgtggtgtgtagtgtgttgagctgtaccttagaacagggttttcatcaggcttctgccacctgctctctgcccctctctgggtctcacttttcccatctgtaaaatgaggggaaggggaccagatgatctcacaggtccctttcagccctgaggggttagggttgggaaggtggcgagggtatctgcatgagtgtgcatgcacgtgctatgtatgagtatccacattcatatacctgcatgtgcatgtgtgtacatatggagggctcttctggttaggccttggtgggtgtgtggcaggtatcttgggcagacatgctactttttaaatttgttgtttcacttttaaaataatacattttatgatttgaaaacaaacgtatgcttagtttatgatttgaaaacaaacgtatgcttagaggaaattatgcaaccaatacacaccctaatttgtgccaggcccagttctaggcactggggatatgtgaataaaacaaacaaaaatctcagccgtgctgcacttatcatctatggggaaaagacaggcagtaccttaagtcaacgatgtgatgttattgaaagtgtaggtgccataggaacaagttgaccagggtaaaggggtcaggagtgggggtggggtgatgtaaggataatgattttaagttagcagtaaggtgggtctggctgaaaagaggatgtgtgagcaaagacctgcatcaggggaaggaagtgctgtatggatgtctagggaatgccggtgccctgaggtgccaaggggtgtgaggtgctcagggacagggaggagaggccagtgtggctaaagtggaaaggcgagggggtgagatgggaaatgaagtctgggggtctagctcttgcagggtgtaggaggctatccatcctaaggatttaggtttttattcctggtgagtgcagattcacctgaacatgcctgccagaggtgtctgtgggtagcaggctgatgtgatggggatgcccccaaccctgcatatgggacccacgcaccttcttgggcagtgagctcttaaccttcacccaggtggtctgggatgggaggagcaaccatgtggagagggaaggcatctcccctgcagaaggggatgaggatctctggtttggatcgagtcgcactgttcactggctgtgtaactttgagcaagtaaactcattctgtggtctgtgaaatgggtataacggtacttcatattccacaagcggagatgctgtgaggactgacttggcttaggtatgaaaaagggtggagggacggagtgcagcagggcccattggcctcaggctctgctttgtgtccttgcaggcggccaacatgtctgggacatttggaggagccaacatgcccaacctgtaccctggggcccctggggctggctacccaccagtgccccctggcggctttgggcagcccccctctgcccagcagcctgttcctccctatgggatgtatccacccccaggaggaaacccaccctccaggatgccctcatatccgccatacccaggggcccctgtgccgggccagcccatgccaccccccggacagcagcccccaggggcctaccctgggcagccaccagtgacctaccctggtcagcctccagtgccactccctgggcagcagcagccagtgccgagctacccaggatacccggggtctgggactgtcacccccgctgtgcccccaacccaggtgagtgtcagcccactgcctcccttggtccaggcctgggccccaaaggctggagacacatggctcagtagatggggagacagggaaaggcgcaggcctccagctgcacttcttgttttaacaaatagtgtcggccgggtgcagtgactcatgcctgtaatcccagcactttgggaagctgaggtgggcagatcgcttgagcccaggagttcaagaccaacctgggcgaaatggtgaaaccctatctctactaaaaatagaaaaaaaattagctgggcatggtggtgcatacctgtaggcccagctactcgggaggctgaggtgggaggatcacctcagcccaggagacagaggttgcagtgagccgggatcatgccgctgcactcactccagcctaggtgacagagtaagacccagtttttaaaacaaaaacaaaaacaaaaaaagacaaacaaagagcgtcaccttcttgcagactccccacctctgggttgtgttgcttaaggcccaagggagctgtcctgtttctcctggtgtgatgagacgctccacatccgagttgggtcagaacacccctggcgagtactccttattcctctgtgtcatttactgcctgggctgtgtgttttgtaagaactgcccaggccacctgtctcaaggctttgtgctcaacagctgtcttcggtcccttgatatgcaccacccccgccccccccggcacagacaggttttggaggattattaaaattccctttgggtagggagaatgttggcagttcctccagggttgatcttggctcattttggagaacagttcgtgtttgcagagcctagaattcgttgtcatggttctgtggcccaaccagccagcacaggggtagtggtatgtgctcaatgactatttttagacagagggtctcctttcctccttcccttccatacccacacgttcccccaccctgtgccatcctccagcctccctcccttatcttttccctgagctgccctcttaattgtgttataaccagtttgtaccagcccctaggaagacaatccactgggagacagtttagcctggaaagttccagtttgcgggtttgtgcagctatcagggtctggaggaagtccggcagatgctagtctagagaacagtgcgagggaaccagtgctagatcaagaggtcatcaggctgccatgcacagttgtggaggctcaatacctgcatccactggaggggacacatgggctagccagccctgttaggagtacccatgtgtgctcacatgtgctgtggaggccaggcatcgatgagagaggccacagcccctgctcccgagacctgcccttcatcaggagcctgagccccagccctggaggacctgggcactgggcagattttcagcatcaggactcagctataggtgagctcccagccactggagccaggaaaaagcttcagtactagaacacaaggccagataacagtcaagttaggtagacgcggcgtaaagtcctctgcattgttgactgtggactcctttagatactccaactcttagagaaagggctgttcccagagtctaggggtggagcagccttgaatgtggggaaggcggcatgcacgacatcttacctgagactgtttgtccgagtagtttggaagccgaggcaccatcactgatgctcccggctttgaccccctgcgagatgccgaggtcctgcggaaggccatgaaaggcttcggtaagagaccctgggtggctcaaatcctactccctgccccctatttcccaggcagtttcactgtggctctgtgggctggggtagctgggggacgctgacctggccccagtggtgatagaaggtggatgtgggggtatggctagcatgcccagaacagttgaggggcccaggccagggaagtctcagctgcagagcatctcatgacccctacccgacccacccctgctgcctcttcctccagggacggatgagcaggccatcattgactgcctggggagtcgctccaacaagcagcggcagcagatcctactttccttcaagacggcttacggcaaggcgagctgcggggtgggggcgcgggacagtgaggcgtgtcctgggctcagcacagccctgctctcccctgcttttccttgggtgggcccggatctcccggatggacagtaaggagcaggagggcatttccttctgcccatccagctggtggcatcgttgggaggtgaaggatgccaccgggtgctgaggtttgctgagaggctccagacatctatccctgggttctagcccttgctctgccacatctcactgaggttgtggccacatcattttccttcccctgccctcttcatgaccaccctggggggtttagctgatgtaagagctttgcagggaaaggctgtgagtgctgcccaagtacgaggggcgtgtatgagcatattttgaacttctggggttttgaatcttagaaagataaaaattcggtaaatattgattagattcgtgttctagcccagtgcttctcaaacttcattgtgtcaccgatcccctgggcatcttggtaaaatgtggtctctgatttgggaggtttggggcagggctgagagcaggcttttctctcaggcccctgggggatgtccatgctgctgttcctcaaatctgggatatggctcttattagtcacttcctgtggattttttaaatagacttgtttttttttttgttggttgtttgtttgaatatccaatcaggatttgatcaaagatctgaaatctgaactgtcaggaaactttgagaagacaatcttggctctgatgaagaccccagtcctctttgacatttatgagataaaggaagccatcaaggtgtgtacgtgtgtgtgtgtgtgtgtgtgtgtgtgtgtgtgcgcgcgtgtgtgcgcacgcgcgcatgcgtgtggacacacagcccagaaggaggcctggatggcgtgctgtgttctagcccactcattagctgctgttgtcagtatggctcccaggccttcctgggttggagtccacatgctatagaaaagggaactccctgtgatttccccaagaggcaaatgacgcaccagtcatcatcagggaggcttaagtctctctccatcttaaagaaaagggggagctcgggtttgaaggttgcgattctgtggtaagaagaggggtaggaggccatggttggtatcgttctcattctttaggactctgttactagcaaatgacagaaacacacttcggtttaagaacaacaaaagtggagaatcagtcatgtgggtaaagagggcccaggccagacgtctctctggtctctgtctctcctgagcgcccgcttttctgtcagtttctgtgcttctcctaccatggctgcttcatgtggggtgggagagggggcctgtcgaccactctccgcataactatgagacccagctccagaagagaccagcagggtctccaaacgggcaggttctgacgggcccggcttggactcactgttccctccagtcctgcgggttttgactgagggttgggtcctgtccattctgtgcagtcccacagctctgtgtgcaccctgcaggcaggggcaggcagctcccttggaaagggaatcccatgagtcaggctggagcccagaaggagcctgtcactcagaggcctgataagcacagtgaatgttccctccttcaggagaagcagagacttcagtgtggtggcctggaaaggagaggggtctccgctgaaacacatctacatgtgttattctagggagggggtcaggaggccatcaggcagggcgatggcccggggccccagggagtggacccagacatctccctggcccccgtcttcagccggagtcatgagctggtggttgtggagtgttagaaaccacacaggtttggggcagctgtcactcaccagctgtgtgtccttgagcacctgtgaaatggggacagtggatgctgtctcaggacatgctgggaatactgggtgaggggctaacgtgtagtaacccaatagtagctgtagcaggaaacagctgacacaatgtcgcacgtcctgcctgacaggccctaagtgctctacgtacattaactcacttaatcctcatgactttcctgtgaggtaggtcctagtatcactcccatcttacagacaaggaactggaagcacagagaggttaagtaatgtgcccgaggtcacacagctggtaagctgcagagccaggattcaaaccaacatacaagccaggctgcccagcctgtcctctatggtcttactgtccctggcgtggttgtccgattcatccttgttgttcctaccttttcctagttgttttcagacattccaccatcccctctaggaccagggtttcgtatgtccacttggatctctcttgctttttacccatttttttcagttgttgtcatctcgcttccggctgaactctgaataaagcaggcctcggtccacattttaacccaaccatttactgtgtggcctcggaccagccagtacccctctctgatgctcagttttctgatccatggggatgcccctttgtgtgagccctactcatcaccactgccactgtcattgtgcttgcccgggctgtggagaagagctgatgccctcgagcctgggagtggctggagggtgtgtctctgtgtcaggggcctctgttgctgggattaaggcagcagcgtagcccccacccttcttcccgagtgctggtgaggctgctggaacaagcacatggttggttgtattctctgcccctgcagggggttggcactgatgaagcctgcctgattgagatcctcgcttcccgcagcaatgagcacatccgagaattaaacagagcctacaaagcaggtgaggccgctccctctgccctctgccctctgccctctgcagatccctgtgctcttggggctgtggcctcattctctcctagggccttttactccttcctggccttcttatcaacccatcttctgccacccccaatactttgggctttgacccaagacccagcccttccttctgtttatacatggtgcaaatgactaatgtaagggagaggcagggaaaacctggatgtggtttgggccaaggctgactagaggccaggtcagcctggaggtcacaggcttgtatatccctggagggccatatgggctatttgttctcttgagcccgagccaagacctccagcctttttctccccagtacccacttttgatagtgttttgcaatgggcagctccataaagagagctacaggatggaccttccttgcttctccctttcagaattcaaaaagaccctggaagaggccattcgaagcgacacatcagggcacttccagcggctcctcatctctctctctcaggtacttttcccacgacagggctcggggcccccaagccatggaagtcaaagagatgggatccccgcaatgaggaaagggaaaataaatggggaaggagtgggcatgaccatacacctgcttcctttcagggaaaccgtgatgaaagcacaaacgtggacatgtcactcgcccagagagatgcccaggtgagtgtgatggccaagcccctggacttcctaaagcagggatgcaccccgctttcttgcttcctgagagaggtaccctagggtggaaagaacaatagataagcagtgggttgcagatgctgtgagtttcagacgcgctgaactgttcaactgtatgacctagaacaggtaatctgacctccagggcttcagcttccccacctataggagggaacatgtgagataattagtatttcgatagttgatagatcatggttttggacgtgggattttgtgtgacagcgtactttccccatgtttagttgcacatagcattatgtttgcaaaggggcaaaatttgcacttgcttattaagtttttgaggatttgagcctagaaaccagctgccacattagttgagcacccttagaattctgtcgttgtccctcttgtgagttgcagacaaaaggggaaaagtccaagcaaagtccaggcatctgagctactctctcgaaaagtttgggtttcccactaatgaatttcaaccgtagtattatggcagggcagagccattacttcctggtggggtggagttggccatacctctctgtctcccttcactgctcttgtcatccacggcagggcattcaccaggagctgccagtggtctaaattatctctaccatctgcgggattggaatgagacctcaaggaatgcccccttgttagggctggaggagagctactcctctggtctggtccttttgctggtcctccttttccggaggaggaaactgaggctcaaaaaggttgagcactgttcccaactgaaagctagaagcagagcccggacaagggcctatactcctggctcggtcttctgtgcccagtcagcacttgcctctgccctggtctcagacctgctgctcctgcagggtctgccttattcagtgtctctctggctggtaacatccattcccattctgggagtcagggctggacacgcctggggctcagggctctggcttttgctccagcgagagttttgcatgccacttttagcggggcaaaaattgtctcatgctctgccttctcagtccagagctgctttggcctcatcttgacctgtgggatctcagcccctgattgctgctttctgctctttttcagggctgctacctgaggcctagcaggcactttagaggccatctagttcagaggttgcaaattggcaaatactttaggctcaaaccttcagaagtttaccaggctctcctgggtgacctgggcctggggtctgggtgtggcctgtgccacatgtgcgtcttcctctctctccaggagctgtatgcggccggggagaaccgcctgggaacagacgagtccaagttcaatgcggttctgtgctcccggagccgggcccacctggtagcaggtaaggcaggctggggtccctcagaggccagttagatgagggcagtcaggggattgtggggaaacaaagctatgggaacacttggtcgttcctccctgcgtggggctttcgcctcctcaaaagagccccctggtgggaatttaaaagacactgtcagagggtttcctgagttctggcaaacatccagttctggaggttctaccggtgtagaaacctggtgtctttgtacgtgggaatgtggaacgtcagagttgggagggtccttcgggagcacccaatccagtgttttccaaagcctggcataagaaacagtcataacaataaaactgggtgccattcatttactcattcattcaacagatgtaaatcgcgctcccgcatgggtcagtctgtcaggtggtggagcaggtgtggggccacggtggggggcagggcactgcagagtgtgttccatgggctgcactttctcatttggggagacagacagtaaacaacaatgaaataaaatctgtatcagatgggaaatcctgtagaggaaaatcaagctggaaacaggtagggagtgatggtagggtccaccgggaggtgcttgggccagtccccactgaggtcgtgacatttgatttaaaaacctaaagggagatgcaggggcagaggcctgcctggggctcccagcacgactgagaacagtgaagggggaccatgtggagcaggtggagtgagcaagaggagtgggaggtgagggcagagaggggagagggccctgctgatgacttcccggagctgggtatttatcctgagcaaaagaggaagccagtggagggccctgagcagaggaggctgtgcagaatccctggctgtggtgccgagaatggagtgaagggtgcaaggccaagcagcgaagcctgtcgggaggctgctgcagggacccggggaggaatggtggtaataggggcttgtggtgaggaggtgtcaggttccggccatgtttgctgatgaattggacacgtgacgtgtgggagagagagggttcgaggattatacagggtttctttaggccaagcagtgggagaatggccctcaactgagacagggggactgtaggtggagctggctttaggtgcctgtagggtggagctgcagggaggctgctgggttgctgagtgtggaggtcaggagaggtctggcctggttgtggaaggtaagggagctatgggtagttgaagttatctgaggctctgggactgcaggaggtcccctcaggagggagactgtggggagcccaccggtgtgaggagactaagaaggagcagctagggagggaggaggacgcagaggaagggggtcctggaggccagtgtgaggtggcaggcaaggactgaggatggtgaccacacggagcaactggtgggctgtggccagggctgctccagtgggcagtgagggtgaaaacccagcgaccgctctgtgctgcacacagagacaggcgctgtggctctccccattcgcagctgtgaaagcaggcacagggtggtagaggaagtaggggtgcacagctagtaacagctgagctgggatttgaacccagaccacccgaccccagagcacactttttaacctctgcactatcctgtaatggagcctgagtgaaagcattttcatcttaatcattatttcttttaatgagtacagaacatgtaagtagtgcatcaagcccatggcttcacaaacattattacttaggagaaaagagtagctgattggaagaagatattaattgagacagatacacacagagcagaaatcacaactttaaaatgcaaatggtagctgagactcaggctggggaaggagagttttatgtcctgggtcagaactggagtcaggaccaaggtctccatcatgccacctgtctctctaggagccagccatccactcctgtgggtgcttagcgtgtcctaggtcgaggtgagcagcaagaagccaggctggctggggcaggctgggcctcagctcacaggcaggctgaggaagacagatggatgcatgaataaagccaaggaatggcagagactggaggtgtggaggatttgagaagaggggacactgtcttggagtacatgggagtgggccctggaggggtattaaggtgcgatttggttaagcagattggcagtcctgagaaagggaccacacagggagggacatcaggtggtgcatgtaacttgtgacgaagactctgacttccttgagcgctagcaggcctggggacgtgcagggtgtgggagcagagtggcaggtgggagattttggggcagaggccacctcatgtgagtcctctgttagtctgctcatgctgccatgacaaaataccacagactgggtggcttaagcagcagatactcattttgttacagttttgaaggccagatatccaagagtggggtgccggtttctcccgtggcctcttcgtgacaatcactgtgctcacatggtctttcctctgcatgtgcacatccctgggatctctgtgtgtgtcctaatcttctcttcttctaaggagaccaggcgaattggattagggtacaccctagcagcatgttttaacttaattacctctttaaagatcttatctccaaacacggttatattctgaagtcctgggagttgggacttccacatatgaactttggggagacacatttcagttcataatataagcctctgtcatccccatagttttcaatgagtaccagagaatgacaggccgggacattgagaagagcatctgccgggagatgtccggggacctggaggagggcatgctggccgtgggtaagtgtctcaggtttgccgcccacctgccaggggctaacgtgtatcgtgagtgttcaggctgctcgcctgtcctccagctgatgggtgacaccgtgaagggaccacaggatccaagatcgctcagcccagagtgtccagatgctgggaagtcatgctgcttcccggttccctgtgcagttgaacccctagctgtcctggaggtgtcttgtgtgtgtttgcggtgcagctctggagtagggaactgcagtgtgggtattagtgggagggcatccaactgcgctcccggaggagtatgactcatatcctgccacgtttcctctaaaaatacatccctgcaggcagttgtcagatgtttgtgatggaaacacgtggaaagatttttacttgcagcagcgaaacaggcccatgctgaggaaagctggcttggctccaggatggtggtgtgcctcttacattgcccatgtcctctagcagggccctcccactgtgcagagttgggtccctgccctgaggccctcacaacccctctttctactcacttgggaaaatcagtctgccccttttttcattatgctttttttggagctttctggatgggagagatggaaaatcctcatttccctgcctgtcccccatagtaggtctcatggcctgggaagcctagggagatgcacattccactcagccacggtttctccatgacggtcatggcctctccagtctgcccctcctgcctgagcagcagcacagttcctcatcaccatccacattgcttccctgtgtagctcctagccccactaagacccccgcccctctgactcttggtcctttcaccgcagtggttgccaggaaagagggtgggttggtttccaggctttgcgtgtttctgttccaaatagctggagccaagatcatgggatagttgagcctggaacagaaggaggaggagaaaagatggatgcagtgatgggtttgacatctgggcctctaagaggacacttgtagactccatgccctgcttgggctgagaattttctgcagatctggttatgccgagtttctctcttctagtgaaatgtctcaagaataccccagccttctttgcggagaggctcaacaaggccatgagggtatgtaacttccatgtgcaggttgcgatggaaccttagcctcgcctgtgcctgggaccaagggctgagggcagaaggcctggggagagctaaatctcagctgagagttccgaggacctgggtagggaggggactggagggcccagggcaggtgggaaggtgaggaggcctggtgctcatgctcttgggtggactctctttagggggcaggaacaaaggaccggaccctgattcgcatcatggtgtctcgcagcgagaccgacctcctggacatcagatcagagtataagcggatgtacggcaagtcgctgtaccacgacatctcggtacgggcctgctgcaggccaactgggctcccttttggcatctcagtcacctgtggaacctccctccttggagtggccatatgcttggcctctgtgctgtgtgtgggcatcttgattatggacctcggacttgttcatccccttgcccttaaacagattataaatttctgagggcaggtggatcatgaccttgctgtcgcccccaccttgcatcccccagcagcatcagagaacactcgggacctccccaaccttgaccgtgaccttcagcgttccgatcaccgtgtgattccttgatctgtcagtgagaactcatgtcccaaaggctctgtggagctctgctgtcactccctgacaaagcacttcctgcactcagctttatggcgtaggccacatagtaaggccgttcagagcgagggccctgggggtcacgccacttggagtccagcttttctacttgctaactgtgtgaccttgaatggctcccttaaatctccctgaaccccagctccattgtctttaagatgagaaaataatcgttccttcctgggaatgttgtgagtattgagtgaggcagtgcaggtcaagtgtctattaaacactagccacagttgtatcgctgtgtggcagagccagtctgacaaaatacattctcagctgtgtggtctaacgctcaaattctgaactcacatgagccttgcaattgcaccatggggaccacgtcctcccaccttagactcagtagcatttgatgatggtgggcatgtcatcacaggaaactcactgtgtttccttggctgtatgaatgaagctgttgttagagaattagtgattctaggctgggcacagtggctcacgcctgtaatcccagcactttgggaggctgaggcaggtggatcatttgaggtcaggagttcgagaccagcctggccaacaaggtaaaaccctgtctctactaaaaatacaaaattagctgggcttgcctgtaatcccagctaattaggtaggctgcggcaggagaattgcttgaacccgggagacagaggttgcagtgagctgggatcacgccattccacttcagtcttggtgacagagtgagacttcgtctcaaaaaaaaaaagagagttaataattcattacagagtatctcctgcatgccagcaagctatggacatctggaagaagccacatgccttgccctcaagttgcttagggtggaaggaaatgattagaaatgagccaagccgagcctgcactcttagagtaagtgtagtggcctcagacagaggagagatccctgggacctgggcagtctgagccttccactggacagtcatgtgtgaggagattgcatttcctgagcaggacactgtgttgcgttacattggtaaccccaatttaaggcagcataaatgcactgggaaaacagcaatattggttagccctgggaagtggtttttaggatgattataatttttttttgtgggtattcatttgatgtggatagctggggtgagtgctgctttccgtcttctgatgggggcctggagaaggctgaactgcattttttaaggtctgtgacgcctgctgcaggacctgcagtgggagaaaattccccagggtggggctttctccctataagggtgctcagggctgaatatcaggacccagaaggctgaaagtgactgtccctcccttaacggatgtcttccttgtttctgtggccagggagatacttcaggggattaccggaagattctgctgaagatctgtggtggcaatgactgaacagtgactggtggctcacttctgcccacctgccggcaacaccagtgccaggaaaaggccaaaagaatgtctgtttctaacaaatccacaaatagccccgagattcaccgtcctagagcttaggcctgtcttccacccctcctgacccgtatagtgtgccacaggacctgggtcggtctagaactctctcaggatgccttttctaccccatccctcacagcctcttgctgctaaaatagatgtttcatttttctgactcatgcaatcattcccctttgcctgtggctaagacttggcttcatttcgtcatgtaattgtatatttttatttggaggcatattttcttttcttacagtcattgccagacagaggcatacaagtctgtttgctgcatacacatttctggtgagggcgactgggtgggtgaagcaccgtgtcctcgctgaggagagaaagggaggcgtgcctgagaaggtagcctgtgcatctggtgagtgtgtcacgagctttgttactgccaaactcactcctttttagaaaaaacaaaaaaaaagggccagaaagtcattccttccatcttccttgcagaaaccacgagaacaaagccagttccctgtcagtgacagggcttcttgtaatttgtggtatgtgccttaaacctgaatgtctgtagccaaaacttgtttccacattaagagtcagccagctctggaatggtctggaaatgtcttcctggtaccaacttgttttcttctgcttgattctgccctgtggctcagaggtctggccttatcagccagtgaaagttcatgtaaccttacgtagagatttgtgtgcaggaaaccctgagcatacactagtttgcagggactcgtaaggacatgggaagggaggttcccgaaatccaggcaggaggcccagacacctgaaaggcaaagggatcttggttggttgcaggtgcagtgaagtccactgaaggtgtggtgcgaagaatgcagtccttcacccaggtcccaggagggaagaagggtgtgtgctaattcctggtgcccctcggcgggggccagagagaaggatggggacaacccagagagtcacaagaccagtgcctcccctcagggtgcctccaggctgaaaggggctcctggctctggtctctggggaccctgtgcccgttggttggtggtgtgagggaagagaatccataagagagtttctgagaattatggtgtcatgtccagaagctagagcttaccttgcatcaggggtctccacccactccttttccaacctcctgcgttgaggtttagaaaagagagaatcgactaggcactatggctcacgcctgtaatccaaggactttgggaagctgaggtgagaggatcacttgagctcaggagttcaagactagcctagccaacagcgagacccctgtctctactaaaaaatttggccaggcgtggtggctcacggctgtaatcccagcactttgggaggtgaggcgggcagatcacctgaggtcaggagttcgagacccagcctggccaacatggtgaaaccccatctctactaaaaatacaaaaattagccaggcatggtggcacattcctgtaatcccagctacacaggatgctgaggcaggagaatcacttgaacccaggaggcagaggttgtagtgagctgagatcacaccattgcacttcaacctgggtggacagagtgagactctgtctcaaaaaaaaaaaaaaatttacctggcattgtagtgcattccctatagtcggctactctggaggctgaggcaggaagatccttagagcccaagaaattgaggccgtagtaagctgtgattacaccactgcactccagcctggacaacagagcgagaccttgtctcaaatgagaaaaaaacaaaaagaaatgggagaatccagagagactaggctagatcaagcctgctgggtcctggcaggagccccagggagtagctcatctgcagacatttgcttgaggactaccccctaaacataaaggaagaatgacatccgaagggtgtggagcagccatgagctgagaactagcctggtctacctgagattgatggcaggtcctggtcaacacgtcagctctgcgtcagagtccatgcctcaagcccaagctgaagccccatccctgctgctctcccaagaactcctctgctagggcaggccccttgcccttgggtgccaggtgggacctgcctgatgggatggggtgcttggcatatacaacttgccatgaactcaaggtgaccctgggggcctcctgaattgtgatggggcctagaaccaatgtgctctgatgtgaccatattctgtgacattaccttgccctgtttactccaaagttcccagcctggtgcccagcaggcaatattgcacctacagacacatttactttggtttccaaagtgtttttagacatttgaatttgttgccaacatttaaacattgagagatttcatatttttaaaaatctggaattctggcttctcttgaaaactcagaaattctggcactatggggcttgcattcctgcatggctggagctgagttgcagctgcccctttaggcctgtactccttatttgctataggctccgtcttgtattacactaagcccatgtcacccatttggctcctgcaggcctttgggtttgagaccctggtctacacacttggagaccacctgttgtaaagtacatggatgtgctttggtcaaggaatagaccaaggtggatatccaggccagagtgactcagcgagtttaggtcacaggcgtatactccacttgttatataacctgcttgtgtaagttcatacttggctcaaagccactattgtttggaaaaggtataactgccctgctgacgctgtacagatgttcttgggctcggatgggcatggctccacgtggtgtgcactagcacccagagagagtgaagctattgacccctgtaagggagagtgaccatctggcagatagatagaggggagccaggacatggctcagcttgtgcccagagggagagttaagccgctgaccctgtagccagggagtgcacctgcaagcatgggggtggcaggagccacagagctggctgctgagaggagctgcagatctggagaagacagcctaggtaaaggtggacagtgtgagagctgctgatgagatagctgctgaataaaactacattttacctgcctatggcccgccaggttttctttcagctatcgcccatccacccagtcccctcgaacctcagcatgggctggaacctgaccctgggcatgacatttggcatagttgtggacctgacacctgtgtttgtcctagtcctgtttctccctgccttcctgttcctctcgctgccctcatggtcactcccaagagatccaacccatgttaagtatgggctggaggactgcatgaatgcctcatgatcttcccagaggcaaaggcacctactgccttccaaggtcagtgggaggttgggatcaacactgtttattatgcttaggacaaaaaagatagggagaaagatgtgcaaccttacaggtcatctttctgggatagaacacaatgggtcttctcctgcctcctggatatgttagtcaaggccagtccatgctacacatctagtctgacttctaaaatagaagcaccagatgaattcagccctgagagaattttcagcagctgtgggggcgctggaggaaacactattaaatagttttgcacctgagacagatagcctcactcgcctcaccctagtcctggtggcatttgtctcaggtgcaaaatttaagaaagaaaccttggagtgctcaccctgtggctgggtagatggtcctaaagtggtggttttcaagcctgagtgtgtatcaggatcatcaggggagcttgctaaagagcagttcctgcggtcagaccctcatgcattttgagcaggtgtggggactgggaaactgcatctgtaacctgctgtaatctaacgcttatctaaatactactgtgctcacacagagaacaccgcaaaagtagaggtgttcctccagagggcaggtgagcagatggcacagtctgcttggaattcagtcaggtgatgagagatgagatgaggcactcctagctttgggaagagggagctgaaagatgaacctttgcaggtgcccacggtcaaagtggtggtttaatgccatgccatgcccattttctgttggccttggcagggagttacagccctaccttaggacctggctccttatttctgctgtaggctctttcctgccctggccgagatggagtggaatgagacctagaaacatcaagctaaatacatgtcctcagaaagataaaggtttacattttcacccccatcaaatctgaaagctctctgcctgtgtttttctaagggatagggacatcattactcagtccacaacctggactcatgtagggtcccctgtcagtaaaggagtcagtcaagcccaccaggtataccaaggactcttaccctcagcccctactccttggaaagctgccccttggcctaatattggtgtttagcttgagcctgactccttctcaacactaagagctgatgaagtcctgaagcagaaagagctctgacctgagagtcaaacatccttattctgatctcagctcagcccctgatttgttgtgtgaccctggatatgtcacttcctgtctttttgactttttaaaatgaagggtagactagaggagagcttctaaaactttaatgtggtcaacgaaatggaataggaaattccacaagtctgtccttccacaaaagcagcaaataaggtggcaaaaactcaaatttatgggaactctggaaacgaattgaaagtttacagcaatcaggtgaatacctaagaataaaagctggatttagtaaga

SEQ ID NO: 72 - DNA, 56600 bp, Homo sapiens
  source 1..56600: mol_type = genomic DNA
gcctgtaggaggactgatctcttgatgaaatacagaaaaaccatctcagaaaaaggaaaatgggcaatcgtcatgtaagtactcattgcctttgggaattggttttaattttggttagcatgtggaagaatttaaactataaaatcatgactgatacttgtatactttatcactatggttaccctttaatattggttttagcaacagcataccatgcttttaaaatgcattgaggccgggtgcggtggctcacacctgtactcccagcactttgcaaggccagagtgggcggattacttgaggtcaggagtttgaggtcagcctggccaacatggtgaaacactgtctctactaaaaaaattaaaaaaaaaaaaaaagttagctaggtgtggtggaacatgcctgtagtcccagctactcaggaggctgaggcaggagaatcatttgaacctgggaggcggaggttgcaataagccgagattgcaccactgcactccagcctggactacaagagtgaaactccgtcccaaaaaaaaaaaaaaaaaagcactggggatatattattcccttattggccaaaaatctcttaagaggggctaaagagaaagaagtatgtaaaataaggcagtaaatagtgccttgcagagagcaaatggttaatatgtatctgtagaatgtataactaaagctgttagtttgtagcaaatttgtataaaacttcataaactaagcccattcagagttatgtgggaaagataggttcatgttgcaaatattaatagaccaaggtaaatactcatgtaagtccacacaacttggattgcaaggtgaaaatattccattattatttctaaacatccacatatttgcaaatatccatggaatggacttaataatttacatttcttttgaaatgtttaggctcctgaatagtgtgtctataaatagttaatgactaaaaactgactaaaacactaccttttggaaccaactacacacaggacagatcagagttgaatcttgaatattttttacattgaagtatatctaaagctattccaatacaaatcttaataaggttttgtgtacctgctgtaaatttccacagcaagaatgatatatttcatgcacactatgagcagagaataaaactccaaaactttctgtaaactgttactttgtctataaggtttttccttcgctatatattcaagctgcactcagatgtttacaaacttacaaatatattcttaggaaaggcattgtttttcaaatcatctacaaatagcattttcataccagcagagattatgagccatccgttcagtgtatctttcagagaaactgaagcctatttttcaaatatttctgatagatgcagaggaccccaggaataatcaatggaccctgcattcacagcttaggaggataattttgtcttttgaaagtcaacctagggagcagctggcctttaggagtggaccagcatttttatgtatttttttttaatcctcagagccagtcgtacaccctctcagaaggcagtcaacagttgcctaaaggggactcccaaccctcgacagtcgtgcagcctctcagccacccatcacggaatggagagccagaggccccacagcctgtaagcactttattttccccccaaatcataggtatgacccctgctctgtcatggggccaatatgagcccccagtgatctgtcatgttggaccctccaccagccaccagccatcatcaggtgtgacttccaagcagggaaatctttccctgcaaaaagtttgttactgtatttacaggtaatgtaaaaatgaactcttctaggggcttagtttctgttcccaacagtgtctcattaacaactccttgaaatcaagcacatgaggctacaccaggaccactatgacatttcagaaaatagtaaaggaactcaacatgtgcacaaagaatgaatacatgtaaaaaagtaaatacaaaatctttttaaagaacaaaaaactatcccagtaatggcttaacttatttgcattagaaagttacttgaatatgtacaaacaaaactagaatgctggtggttttgaaacagctacacaaccaaaacaaatatataaattaaatgataatgttataagtcaatgctgtttaaatgtatgtcatcaacatagtgtaatagacaatgttattttgttgagattcaatagctgtgctcaacatgaaatggtcccaatggctataatgctgggtttgtttttttttttttttttgagttttacttggtttttgttttggtttggtttgttttctgaatctcagcaaatctaaaatatgatgtggtatgtgacttctgagttcttttatcatatttctctattgaacctactgagacacttttgtttgtaagcctccttgtaatgccgtgggaccttctctcggcttacacacatggtgtttctattaaatctccctctgttcactcttctttcatcattagcctgcaattattgaagtatggctgtttggcatataaacaatcgtaaatacaaacacaaatgcagacatttaaatcatgagccaggacttggtcatcttgatgatctaggatgctttatattaatttttaagttattatcagcatgaaatgcaaaagactcctagaaaagtttttattcccccaagaatatgtccacagaccagggcccatagataattgacaactattattgcagagccagtagaatattggccaggaaattgcatttttcaaggtactatcatctgaaatcctaaccaatcctgaaacgaaaattacttttgtgctatcctcaattcttttgccactattaatgatttttttgaaccaaagacctagtgtttgtaactaacctatgtggagcagcagtaaccaagatactgggtcattatcatccgccaaatcacacaatgttcaaagaatttccttatcctggaggacatgtccttgtgtccagtgagctttgcaggtagagtgtacacagagagaaagatcagatcagtggaaaaatctgcttaggtttagctagatgactcttctattgtctgggttttcacaagaatcactatctagggaaaaatacagaagtgagatcaatattaagattactttaccacgggagtgtggctataggatatgtgcagaatgacagagggagggagacctagtagagccattgataaatgtggaaataatcacaaactcaaatggactcatgatttctgggaaattacttgcaaggctaatgaacaggcaatagaaaggactacagccctgctactcaaagtatggtccctggatttgtagcagcatccacattgcgtgggcacttgttaggaatgcagatgctcagcccactcagatctattgaatcatagtctgcattttaacagactcttcaagtgattttcaggcacattaaaatcttagaagcactggactatggaacgcgttgtcaaacttgcctgcattgagatcacctgaggagttctaaaagccaccgatgcctgggtcccagccctagagtctgaattaattggtctggtggttgtcctgcgcatcagggtttgtaagtgctccccaggtggctctaatgtgcagcagagtttgagaaacactggactgtagaatatggctaacctttcaagaagagctctgcacactggggacaaaggcagatggtcattgcacatgctcctaactgaaaaccgatttgtaaatgttagaacatctgttcagtggtctgccacgttgtttgtgaacatgccaagtttatgacttgcttgtgccaatatttagccaacataaatattgtctccagtggagaacagtttgggacttgtggcaggtgaacaccaggcaaggtgaacactcagatgaacgtggacaaagaacatctgaaagctgcatgacaagtggggaaatagatccagattcctgagaaaagaagacaggctctggaggcaggtgaaatatggctgagaatttgaaattaaaataagtatggtcttaaccaagggtgtgcattaaactgtgatcccaaatccagaagacccatgatcaagccctagcagaaagcagtctagatcatttcaaaagacttaaataaataaataagatccttatttatttatttatttaagatcatcttaaataaataagattaggaaatattacttttttttgagacagggtcttgctctgttgcccaggctggagtgcagtggcacaattatggctcactgcagcctcaacctccctggttcaagcaatccttttacctcagacctccaagtaggtgggactacaggcatgtgccatcatgcccagctaatttttttaaagacgggtcatcctatgttgcccaggctggtcccaaactcctgggctcaagcgatcctcccacctcagcctcccaaagttctgggattacaggtgtgagccactgcacttgacctcaggaaatctattatcccagaaagttagtccttcagaatgccactgcaaaagtgtaggaggaagtgaaaagggcctttgatgtcaaagcatgacatgcaccaatgcataccttcttcatttaaagacaagtctctgaagggtagctacattttaggtacaattatgcaatcttggccttttggatattttgtctatggtggatgcaaaaaaaaaaaacaaaccagccattgtaaggaggtggtaagaagtcggcagaggacagatacactgatagaaggaagaacatgttaaatgaaacctcaacacaagaattctagagccgcgggagtctggagccacttggtgcaggggagagaatcctgcatgtcccagcagcgtgagcccacctcccagtgctacagccacagcaacaggaaccaaaactaaaactcccagtggtgatggttgtaactggaagtttaaacgagatcttctgaaatgttaatgataataactgacatttataaagtgcttactagactgtgggctgttttgagggtgtgaacagtgaccctggaagtttgagtccttcacgccaccaagcacttcacatgtgttacgtcatttggtcttcacaacaatcctatcagggagatactattattagtccccttttaaatatggggaaagtaaggcaaagagagtttaggtaaattgttcctagttggacagctagtaagaggtcaagcacagatttggatttaggcacaaatttttaacactatgccttgggttcaataaagcttctttttacgccaaatagaagattaacctattgggatttctgaaactgttgaactgaatcatcacctcgtcatctctttagccccttccctgagctttctccatcccctgccccccaagctggattggatgctcttccttaaggcttccatagttctctctgcataactattactccactcccatgtggttttagaaccatctgggttttttgtttttgttttgtgttttgagacaggatctcgctctgtggcaaaggctggagtgcagtgtcacaatcactgctcactgcagcctcagcctctcggggttctcctacctcagcacccccatacccccaagtagctgggaccacaggcgagcatgacaacgcccagctactttttaattttttgtagagatggggggtcttcctatgttgctcaggctggtctagaactccggggctcaagaatcctccaacctcagcctcccaaagtgctgggattgattacaggtgcgagccactgtgcccaacagaaccacctgttttgtatacctgcctcacactggactgatggtttcctgaaggtagaattgtattttgttcacctatatatccccatcaccaacacaatgcctgcagcatggtagatgcttaataaaatttggataaattcatcaatgcattcattgcattttctaaataaatcttaaacaaatcagtgttttgcccagttggagttcaaattcttatatctatttacattcccagaccaattcatgcgcaaggccctggcgtctgtatatttttaaactccccaaatgattctaatgtatccaaagttgagagccacgagtctaacgtcaggtattctagtgcagtagttttcaaatgaggtctcccaggcccgcatcattggtataatccaggatcttgttaggaatgcaaattctggagccccaccccagatctacagaatcaaaaactctggagatgggatccagcaatctgcatctgaacaagccttccacgtgaaactgatatgtgctcaagtttgagaatgacagttgaagcataagcctttcccatgcccaggctggggctgtgcctcagcattgactatggggaactcccaccattcaacctacagagatgcccagatgatggcattgaaacccgggttagcaccacacctgcctcctcaggcttctcacccggaatgcagcccggagaactcccccattctgctcatttccccaccccacccagggttccctctctccctgctgccatgtaagatgtgactttgctcctccttcaccttctgccacaactgtgaagcctccccaaccatgtggaactgtgagtccatgaaacttctttcctttataaattacccagtctggggtaagtctttattagcagcttgaaaatgagctaatacagacagcaataattggatttaggaaatactctaaatccaggatgatttcattttgagatccttaactaattacatctacaaagactctctttccaaataaggtgaattctgcggctgtgagtagacatgagttgggtgagggggtgggggtgatactgttcaacctacgacactaaggaaattagattttatttccttaggccagcagtgattttaaacttcagcacattagagttccttggaaggctttcttaaatggagagttgggtccaacccccagaatgttgattcagtaaatctaaggtggagcccgagagtctgcatttctgagttccctggtgatgttggtactgctggtctaggaactacactttgagaactgctgccttaggcatagggaagcccaagtcagaatcagacaagggagtaacaacttgagtgctgcttttagctagaccatgctggaagctagtggagaagggcttggagagaaacatgactagaggcaagtcaagcacttcggaagcagtggccctggagagaaatgaagaccctctgccaccctccaccctcatcggctaaaatagcaacaatggaactggggagaaggtagatctgagtcaaacgaacataacttgctaagtggatgtgggaggtgagggaaaggaagacgacagagtgactccaggtgtcttgtctagtttgtgtgcacaggtggatggtggcacatcccagggatgtaaggcagtgacagattgaatttggtttggggatctatagagtttgagatatctttgcgaagtatgagttcacagttgtttttgtttgtttgttggacaattagtatgtgtttgatcgaaagtagcacaccacaggactcactttggcttaaataacaaagacatttaattgtcaattctaacaggagctctgaattaagctgattccagtgttggttcagcagttcagtacatcattagggacccaagctatgtctgcctttctgtcagacatactctggatgtattagcaatgtctccccacctaggtgcaagataactgtcatgtgttcaagttaatgatctctcaagatagtcacaagcaagaaggaagcagatagagggaaaaaataccttcttgcttatgtacatctcccctatcagggaggaaaatctttctgcaaagctccaagcagcagacatccctttctatctcactggccagaactggtcaaaagcccaacccaagactggcaaagaggaagaggagagccttgaatcataattcatccctgaggctgaacaaatcatcttctcagttctctctctcttctttctatgtgttggcctctttctctcctactgaaaataagctttttgttttcctcgtatgggaagcaaaaggggctggtgagagggaggcatggccatagatagttcaggcaccaagagaactccatggcctcacatagctccagattagcagcctcaaggaaaatctcttctttctctaagtatctgtaagatgtcagggaagaattccagttggcttgggtcatggacctaccctgtgaataatcatagtaagtaaggttggccttatctttatcatcaccgctttcttataactattatatttattaatatactactgctattactactaccactactgatactaatactactagatggactgaaatagaaggaggatgcaaacttgaaaatcagatagaaagggagaaaataattctctttccaaataatggggacttggatggttgtagtaggaatgaaaaggaagataaaatgttaaagataattttaaagaaataatagactaaaaattaattaattaactaaaagaattaatttttttggatccaatgcataaactcttctaccaagggaaagaataacattcattgttttgatactgattgagacagaaatttgctcaaagcaaatttagctattttaccttgtttccttttcagcaaatcagaacttgtccacatactgttgactgcatcctgctacacagcacatttgatgccatgaaggccccgctcagcccccaatattctcacttttcaattccatctgcccacttatcattgactcttgaggattccagagtacacttgctaccttttttcctgcaagtaatgaatcccatgttcatactctcattgaattggcaaaagacgacctttggcaatataagaaggaaatggatcattcttttctaatgagaaacgtgcttcatttttcataactcctgaaagcatggttcctttcacggttgagaaatatccatcatctccacacaaccactttatcctccaagttctcttttgttgatgcaatacagtggtaattggatatctggaagtttagcactcttcagaggtctccaactccccaaacaatctgtggacaacctcaaagcagacagtcattttccccaggacacaaaatcttgtttccacataatgaatgttattctgcctctactagaaactccaagttctccagcccaacacagcactcaagggcccctaagaatgagtcaacagagagatgtcacttgggcacgttgccctgccggtataggctgggatgttcacaacaatcttgatgcagacaaagaagcaggaggtgacaacaggtttctcactttgaactgatctcagctcacaccttcctcctagttaccttatctcagcactcatctttcagatttgtcatctgggtttctttgcaaaaaaattaaagaatgtaagacatcatggtccatttctattcttcccttttaagttaccacagcaatttgcccttggtgactggaggccttgctttagtcagcacctgtgtgccgtttaccaccagaggcttggccttctccacactttttaaagagacccgttgacagaatcgttacaaccattcagccagggttgtggacccttggcacattcgtccttggcactgctgacatttgggaccaggtaattatttgtgtgtgtgtgggcggggggaggggggctgtctgttctgtgcattactgaaggatgtttagcagaatcctggcctctatcactagatattccagtaatactcccctactcgtgccaactgaaaatgtctccagacattgccaattgtctcctgggagacaaaaatcgctcctggtttattgagaaccaccgcttaaatgggaaaacaaggctccagggcagatgtcctcagaatgtctttatgtcactggatctccaccagaaatcaccattcctgcccttctggcccaggcatgtccctacactgatttcttctcttataacagagaaaagtcagcttctcctgaagattgacccttatcctcctgttgatgacagcagcagccaagaggcagcagtttttctcaaaactgttagcccatgagtaacaacttcttcttttttaaaaattctttatttctgtaggttttgggggaacaggtggtatttggttacatgagtaagttcttcagtggtcatttgtgagattttggtgcacccatcacccgagcagtatacactgaaccctatttgtagttttttattccttaccctctcccaccctttcccccaagtcccaaaaatccattgtatcattcttatgcctttccgtcctcatagcttagctcccacttatgagtgagaacatatgatgtttggttttctgttcctgagttacttcacttagaatagtattctccgatcccatccaggttgctgcaaatgccattaattcattcctttttatggatgagtagtagtctattgtatatatataccacagcttctttatccactcattgattgatgggcatttgggttggttccacacttttacaatcgcaaattgtgctgctattaatatgcatgtgcaagtatctttttcatataatgactccttttcctctaggtagatacccagtagtgagattgctggatcaaatagtagttcttataccagagtgagaagggtttcactgcagaaaccctcagtaaaaaggctgctgggctgctggatttcctgcctagatgagcagtgctcccctggaaagacacaggctggaaccttcaggagctgattggctcacctctcctctgtttgggtgtagcccccaaaagggctaccccacttggactccctataccacagctcagtgcatggcaggatgcccacattgtttacactcctgaggataccatcagtaccttcaggtacaatggtgcccaccagtttaaggcacagcatattgaagggccttcaagtcaggtctcctaactcctacccagccctgcagtcacctttgataagtaaatatcacatcaacacgtgtaacccagatggcatagcctaaggaagcttgtctttctggaaaatgacctaactataccaatcttcattaaaaggtgctgaaatgccaacatggaagcaatcccaaatgtaatagaaaggtcatgttttaatctaaagaactgaactcatttttcagaacatacagtcaacatatgcaagcaaatcatgttgagctgtgatccaaatggatgtttttctagttttagttttagttgttaaatgatacaaatatttctgcccctttagagtgatagccaaacacttagtcatcatgtaagtcactgtaatactgcatcttggaaaggaggtatcaacagcaatgaacaactctgtaacattccagcaccctactaaggtgggcagagctcaagtttcctaacacactttcccaacagctctctgatcaacccccgcagattaataaacttctaatgtgggaagaggttctaggcatgaaggaattggcttgcttttagtcggtgtgagatcctggagaatcctaatgaaaacagcaataactacatgatgaaataccaaatattcgtattcaaactgtgcttaaatatacccaacagggtatactgccaaatatatttttttctgttgggtagttttatgacttaatgaaaccaatatgtcactaatcacccaagattcatgcttcagatgtgaatggcccctctattttgtttcaaattgctcatcaatctctactaaccatgtctgtggaaatgtcaccaggatattttctggctctgaattcatgaatgttaaaagtacaataatttgcattcatactaactggcttcaaagtgcaaatgagtaaccggttagaggtaaaagaacattgttctgagagagataggagatggatgtttccataaggtgaccctgagcaggtgacttaacaaccaggcttcagtttctttatttgtaaatgatgggattggatacattcaatgtctcccaaacttcagatttaagtacaaccttcatgattgttgccaaatatatgggttacctcttctactaattattctattaattatttttaaatacgcactttttaatataaattaatcttaaaaggaaattttatactgataccataaatggaaaattaatgtcagttgacataaatatagataactaaatgaaagcaaaaagaatgtattaaattctaactaaatttgatgttgccagctgaagggtaaggtcctatcctctgactaaaaaaggacctgtttacatggtccacatgggatacagtgggagtccacaaagtaaataatgaggctttgtgggccacagaacctctggtgcaagtaggtaactactctgccattgtagcgtgaaagaagccataggccaaatgtaaatgaatgggttggctgtgttccaataaaactttatttacaaaaataagtaatgggccagatatggtcctcagtctgcagtttgccaacccctggattagacgagtgtgaaagatccactatcactaagcaaagacttaatcagaagagttgggagagaattttaaaaggagttcctttcctagctggaggtccaatggctttaatgctttcagtgttccatgtcacccatttggaaaaacctgggttcaattttcactttaagatttcatgctaaacctcttccctttatctttagcatcttggataaggtcaaggatttctttcttgtgtaaaccttcagcacatttctaagttgtcttcctcctttaccgggatatcaacagcggaagtttctaatttttctcagactaacggttctcaaccctggctgcttgttagaattgtctggggagttttagaaatatttatacctgatatatccctgtacctcagagattctgatttcataggatcagactgggatcccaaatgattttgagtgcaatccgggttgaaaggctactaatctatatcttggcaaggtcactttcctcagagtccattattttctccatttggtattaaattctaagagccccaaactctatttagctcaaactgtttcacacccgaaggtcttaggacttcactttcatttgtgattcctgttatttctccaactgaggtctgattgagccctcccagacaccttggttaaatttactgttcctcttttcattctctctgcttcatcattttggaaagcttgacactattctcagctcaagatttctatccagataagtttcctgttccattcttctgtccctactactgccactgactctgacattaatacaaactgggagcaagaccaggacgcaaagaaaaggcattcagtgtattctgtaacatacaaaggaagaagattcttcctcccatggaaaagaagataacatttaccaagtacctacaatgtgtcaagcattgtgctaggtgctggggatatgagagtgaacatgacataacctagcctccaaaagtcttacagtctagggaaggaaatagactaataaaaaagtatgataatgtatctgttaaaagatctgatagaagactctagagtggagggtagaacaaaagagtcagtggtgtgctagaatatgtctcaccaccagctctccaggagaaaacaaaagcctaatttgtggtgcttgccaatttccgtggtgtaaatactttcactgtgactgatttcaggttaccagcatgatctcgccaagcagagttgggaggagatcacacaatttgttcttgccagcttgcaaagtcagctccagctagcagggccaaccatcctggtttacctggaactgtcccagttttagcacttaaagacccacattccagggaacccctatgtcctgggcaatcaaacagtttagcttcagcacaccactggaagaattcgattcttcccaagaggatcaggaatggtttcagaaaggggaggcttcagcttatttgcttaagtagaaacattctccactgttgccaatggaatcaatggctctgtgctgtcaatctcaagtttctttggtcctccgaggactcaggaagttgcagggaggaatccacttgcagcattccccctttttcctccccctgcctcccactgatgggccccttgggaatcaaacaactcagcaatccatttgcatagattctgtcaagcagggagaagtgatattttacctataaatatatttggcaatttatccagctggaaagcaggcacccatcagaagaaagcatattggaaaccttggccatcccactggcttcgtgtcttttcagtcttcaaaatgtgtctgctaaaattcagccccctcgtacactgtagtcttttagctatgatccctcctctacttgaagggaaagatactttaggaaagggagaactggaagattgggtgtgaaatgaggagggaaggagaaggaagaagcttcctaacagcctttgaagggcagaagggccacttcctcccctgccagccctgagtcatcataatgaaacctccctgtccagcgctgtgacattgtcttatttaatcttcctgagattcttcagggtgggcaggtattagtcccattttacaaatgagaggcagaaaacatgattctattagcatcagaaggaatattgggagcagaatttgacaatagtgcctctcctacatacacactttgctcactgggagatggctgtctgttttgccttgcaaatagcggtgacttcatttttcattttactttctattttctcatcatcgagaatatttattgatcctacagctatgcaaggggttcttggcttctctggtcaccggacaagtctcaggtctcatctagtgtttctgtaaaagactatcattctaagagttgaactgagcttttctttctttctttctttctttctttctttctttctttctttctttctttcttttcttttctttctttttctttctttctttttgagacagggtctcactctgtcacccaggctggagtgtagtagtgcaaccacggctcactgcaacctcaacttcctggcctcaagtgattctcctgcttcagcctcagcctcccaagtagctgggactactggcacacaccaccatgccaagctaaatgtttaaaattttttgtagagacagggtctcattatgttgcccaggctggtcttgaactcctggtctcaagcaatcctcccgccttggcctcccaaagtgctggaattactggcatgagccaccctacctggcccagcttttctattattaaattaaaaataataactattatttagacaataaccccaaaaacccattaatgagaagtcaatagtagagtttctgaatccagactgcatgggtttgaatccctatctcatcatacttgtgtgtcttggtttttctcatctgcaaaataggaggtaataatacctaccccatagggttgttgggagaattaaatgagttgctatttgtaaacggtctggacccatgcccggcacatatgaagtgctctatattttgctgtcattctcaattttgagttttcctcctatacatctctcttagaactttagcccctgctactctttttctatgagtacaaagtgatttctaatttaggacaagcttttgtaaacagtcattttgagcttcctatagtaaacttccaattttaaaggcactacacaaagcaccatgcaaagggctcactcaacactcagcaggaatcaggtcaagatggaagaaaggaataaaaataacactcagcactcaccacgtgttgaatatcctgccaagcgctcttgatacatattctcctaacaacccatacgaggtgggtactattattaccatctttcagatgggaaaacagccttggaaaagatacggaggaaaaaacagcctcgtgcctggttcaaaggtagatgtctgtgagagaggaggcagaacttatgtgacctcaaagaagaaccttccccaaactggactcagtttccttaaatctgtagtattcttaagatctatacaaggcaagtttacaatggaatattattcagcctcaaaaaagaaggaaattctgccatttgtgacaacttgaacaaacctggggaacattatgctaagtgaaataagggagaaaaataaatactgcatgattctacttacatgaggtacctaaaatagtcaaactcatagaagtaaagaatagaactgtacttaccagggaccagagggaggggaaatgaagcactgttcaactggtacaaagttttggttacgcaagatgaattcgttctagagatctggagtacagcaaactgtaccctatactttattacacacttaaaaaattgttaaggtcaattgttaaggtcaagtgcagtggctcatgcctgtaatcctaatacttatggaggccaagactgaaggatcacatgaggcgggaggattgcttgagcccaggagttcaagaccagcctgggcaacatagtgagtccctcttgctacaaaaatttttaaatataaagtattatttgtttaatgggttgatgtcaagttaaatgttcttaactcacacacacacacacacacacacacacacacacacacacacggggacacaggaaacgttcatagctgatgaaatacttattaccttgatggtggtgatgatattatgagtgtatgcctatgtccaaattcaccaaattgtataattaaatatacaatatattttacagcaattatacctcagtaaagatgtttaaaatatttttcaggaattttgaaaaaaaaactatacaaggcaagcttaatcagaatcaccaatattggcgcaaggtgccattaaccaacagtggcaatggtaacagcctaaaccgaggagaatcaggtgtgtctgaggctctctccagcacacccttcacctgcctccattttgctcctgcttaacaagcccaggcaaaactacctggttctaatcttggccctggtatttaatctcatttcatgccagctcaaacagcagttctctgtagatcagtgtacagttagccctctgccctctgctccctggctcttcccgggggcccctcctggctcacagcccagatactaagcaaccattgtcaaatgtttactgagcagagtgcagccagccaaggcttctgaggaactgcactggaaatattaaacagtccaaatgccactcccattgcattttgataatactttcagagtttacaaatgacccttacatcctatgtcacccagcatcccacctcctacgtgccaccacctgagtgcttaccgtaatccagcaccgtgctactacatcccaaacacgaatgcatctacaccgcacaccaccccatgcacaggtgcatctccactttaaagatgagacaactaaggctcagagacgtgaatcagcttgcccaaggtggtacaaccagcaaagggcaaaacagcaattgaacagagtaggtctgactcccaagtccacactatgtggactattatgtcatgattagatgcaatcatgttagcacattgataggtcatagtaagcacgcaagtacacagactcccaaagcatcaggctgtggtctctccctggcatgtctttcttctacctcccctctctcttttatttaattgcttgtctaattcctaccgccctttgagaaccagcacaaatgtcaactcctccttaaaaattcctttctcctctcagctatttgtacccaaaagtgcttactgtatcataatgcaattgtcatgtgtcatttacatgtttatttccctgggaacagggactatgcttcataaatcatggagtcaacttcaactggggtagtgcttaacatacaatagattttcagtacttgtttgttcaaggaagataagggaggaaaaataaggagaagaaagaagaagaaaaagagaaagagaaagagagggaaaaataattcagagtctaatttgcctgtaacatatttcttaattaattcacatgcctctcatgaaacaatctattcttattgtccagccttgaagctattcaagtagaaaatcaggacacaaggactgacaagtatgaatgtacttaagtgagtgtatttctggctgtgttctggaagatgctggttactatataatacttagagcaaccaatttgcaaatcatatccctcagcaaactccttcacacattccatccccagagtttgctgcaacctggaagatgttcctagaatgttccatttctattataagagttaagacttccttgaattggactgggacagaaggcatttgatcaggcgtctgtttttccattctggttcttctggctgagggtatcagaatcttgattcaaaagagctgacctccctcctgggcaatctgctctgttgcagcaggaacatccctgagtcatttctcaacgtaggtgttttctgcattctttctgccaaggtgacaccgcttcctaggatcagagcatctcgtttattttctatgcttcctcctttgagaaaaatggatcattcatgtccttgttttagaggaggaaacacaggaacgtaaatacacagagaaggacatgtagacctactagaaggaagaaaaaaccaaagtggaagtccccccagcaccagtgctgccttgttcatgcaccaggcagtgcctttcatagagctgacagcacttgcttccattttggacctgaggtccaggcatgatggccagcacctcaacagaaaggtatcccagggagagtctcacaccccatgaggtgtgaattttcacactcgtcaaatgagacagttaacaaggtgtgatgttgggacatcatgccaggccacctggactccgcagtgtgactgcccggtgtaaaatatatgtctggaacttcagatccaagctgcaggtgaccaatgagaaattgatctttagagtgccatttacaaggtgaaaactcctcaagcaggaaaggggtttgaaatattctggaaagtttattgctgatttgccttcaacaaatatcaatagtttgcatttacaaagtccatgctgtcagccaggcttgttttagatgcttggcatgaataactttaattcctccaggaaccttacgtggtaggaactattattatccccatttaccatagttagtttctaagtgagatccgaaaaaagtcggtggggtggcgggcagctggaaaaacactcgaggaatcgcagggagtttcaacatggctttactctttctctgggcgcaagcgagcctgggtgcgagtctgggcgtgagccccaagccagaggtacagcgttagcagcgtaattgtaccttttacagacaacagtggctccaagccaagcacgagcgcatctgagtggttacttaatgcgcctcacgtggcgtggttacgtaaggtgtggacttgtgcatctgcactccaaacctgctgagacacgccccgtcagaaagtcgcctcggcctactccctactagagtgcagccatctcccttacaaccatgaagaaagtacagcacagagaggttctctaacttgcccgaagtcacacggctaataagcagttgtgctgggactcaaattcactctgacaataaagccacattcttcaactttactattatattttcagtggccacctattataaatatgatgttgcttgggcattataagataaatatttgacaagtatggaagatatctatccatctgggatcaacatatgtgaattagaaacctatatatctacatatggtacatatgtttgtgtatgtatcttcatatacataccttccaaacctgttaaatctaaatatgtagaattgaaatctgcttggatatcacttttatgaaatcttatcacaaggcaaaaagccaagaaatgacccaaagagacaggggaaggactaacatttatctagctccctgttttctggcatttgaaaagttatttcacgtaaacctcaagccttgcaacacagagactgctcccattttacagatgaggaaatggtagcttagaggttaatggcccaagttcacacagctgctaagaggcagatcctcattcaaaccaggattcctgtgggctcaaagcgcagacctccaaaatcattattattgacgtttaatatcttgtgctgtttttatctgtctcctgagtgtcagtgcaagcactgtcaaaaaataaacaaattgaaagaaaacaaaacaaggaatgttgccctggctctacaatgtctcctagttgaaaacaaatggaatatccgtgtggtctcctaaagcctcacaagcttgtcagaccccatcctggagtaccccgcagcccattctgtatctgacttgcattctcactgtatgcagaagttctgctcagttgcttcaggtttcaaaaactaaatctctggatagggaaacaggcctgaggcccatcgtcagctgtctatcctattaacaatgaacaatggacgtggaatgtccgctccatctacattcccgagaagaagttcggtacccagctcctgggaacaagccataggacacccgttccatcagcactgagcatcgctgatgaatacagccattgtggaggcagcccccaccacaatgaggggacaacgccaaaccgactgtttttctttttcttttaaaatcacatcacatgattctttcacttcgacatcaaatatcctgctgttacaaggaacaagcctgaattatcttctcaagcagattaggaaagataaccaacgtggctaacagtggttcctacagggagtcaggccactgggacctcaacctgccctgctgatggtggcgcctctgatagagagtcctaccccacattatttgttaaggtggctcacgcctgtaatcctagcatgttgggaggccgaggtgggtggatcgcttgagctcaggagtttgagaccagcctgggcaacgggtgagaccccatctctaccaaaaatacaaaaattagccaggcgtggtggcacatgcctgtaatcccagctacttgggtggctgaggcaggagaatcgcttgaacccgggaggcagaggctgcagggaaccgaaactgcaacactacactctaccttgggcaacagagtgagaccctgtctcaaaaaatttttttgaaaaaggaaaaaaggaaaaattaagtcccaatattatcttcattcatagcacatgactcaacactctcctgctgcacctcccagatatcagagttacttgggatcaaatgacacttatttactaggttttttggtcttgggcatgttgagagcattcttttgtctcacccctcagctcctacaactctgtgatatttgtatcatggaatggcctccctaaaacgggaaggggatgaggggcaggcatgtcatttagatctgtcagaatcagaaaatctggttctagccttggctcccactcaaccgctgcctggccaggtgatcttagacaagtctccacacggtctctgcaagccctcacagcttctttgtgcaaatgagaaaaaggtgacccttgaggggaagcagtcctgccagcaccaggcttggcaagcatgcccccagctcagttctgccccagcccctcagccagggcctcaggcagggcataacccacacagccatttgcagagccctgcatctctgtttcagcgcattagttgtcaagtgggacagatcatgtgtcccaaaaaattctctgcactgatgaggctaacaggacatagagaacagctcatgaattagccgagtgataggagatttctgttgccctgattcaattctacctcacttcctgggcactccataatacttcggatgaaaagcaaagaagccattactatttcgaagttgccacttccacacttagaggaccagctccttcagaatttgatcaaaagtagggtggcctttataagtgtgcagcctctgcaactgcatagggccccatgctcagaagggccctgtgcttggcttaatactctgatgttaccatattgaaattcttggtaatttttgaggaaggagccctgcactttcattttgtactaagcccagcaaattatgtagctggtcctgccaacaagcctacaaaagcaccaaatagctttcttacatctcacaaaagatttggataaggaaaacaggaggtatcattctgcaactccagagtcatccgacccctctgttggatgatggaagctctagttatagaatgtgaggcagtattgtgcgctgcacagagcacaggctttaggaggcaaattgagctgggttcagtcctgcatcctgccagacctcaaacaaattatctaacctgcctgaacccaggtttccttacctggaaggcagactagtaatgcccactcttccctatgcataatgaagaaaggtctataaactgcctggcacacagcaggtgtacaacaatgtcagtcccctttctggcttgtttcaggaacagatgctgcgagatggggcatgccctcatgttccaaaaggcagggaggttataggtggccctgatgttcctttcggctctaggagtctatgattctccattaactaaagcctcaagccaactcaccttcagcccacagatgttagccaggacactttggatcgcaaggatggaaacccaactcatattaacttagaccaaggaagtttgctagctaatgaaacggggaagcccaaggacacaggcgctgctgtgtctgaggatttgtacaatgtgattctttctctctctccctttatgtagtggacaaaatgggcactaagagccctagactcacgcactttcactgtagcagactcagcaggaggcagacgtgtatctctctcagtatctatgtatccaccaagggaaagactctaattgactctaatcctgcttggattacatcttcactcctgaaccaatcctgattgccagagtcacaggacacgtgcctacattggtgaccaagggcaggacaaaggggctcaagcctcatgactgacagccccagtgaggccacacaatgggggaaggggaaataaggagaataaggatgccatgcagagaaaggcaacatacccactgagctgcatgtggttgactgttcacttccactgggtgccaaaggatatgaaagcagggagagttgaactgcggtgctactgccagtagcacttaaaccagccttcactgaaggatggaaaatatatggacatgccgggcgccgtggctcacacctgtaatcccagcactttgggaggccaaggcaggcagattgcctgagctcaggagttcaagaccagcctgggaaacatggcaaaaccccatctctactaaaaatacaaaaaattagccaggcatggtggcgtgcacctataatcccagctatggggaggctgaggcatgaaaatcacttgaacccaggaggtggaggttgtagtgagctgagatcgcaccacttcactccagcctggttgacagagagagactgtgtctcaaaaaagaaaagaaaatatatggacacatatcacttaggaaaagctccatgagaaaaggcaaagacaggaaactcagggtgtgttcctagctaccagctgcataactacaattaacctcacaggttaattgcagtttttaatagttatgtgtttatatttatggttaccttccatttatgcaagcaatactgggtttccatttttgtgctcacaaaaatttcctttttaagataactttaagtaaaaacaaatgtcaatttaaaagaaaataataagcaaataataattataagcaaacaataatttccttattatttagacataggtaactgtggatgcaatagtgcatgtattgtgccaatgactgaagtatgggaaacagctcaatacactatataaacaggactttaccttcccaaggagcactaaaaccaaaactgtgcttttactggttcctacagtatctccaacaaaccaaatatgtatctctcattgtatggatggcaaagatccaagtcaccatatgaacctgtaataaggtcctagaaccctcagcctctgacctattccttagacatagctgtgtctcatgacaaagggggagaacaagcactccagtacactggcttacagtattattctttgtttcagaggcagacacacaaaggtggggttgatatgaaaatctctcattgcagagctggccaggatgattgtccttgagaacagaggggcccattctcctggtcatccaaggccagctggccccaaggagtaccagccacctctctggggccagagtctccccagctgatttccgcatgtaccagtgtgtgaagtgacagctggtccctggttaggatgactatttggtcctccagtttgctaccgattttagccagagatcatttaggaatgcgtatattgtcatctcaccttttcaattattttctccaggctaaagcgagcagtcctcagggttttgatgtggatcgagatgccaaaaagctgaacaaagcctgcaaaggaatgggtatgagagatattttgttgctaatttgcttctgaagttgattaaacttggtctcatgtccaacttccccatgatgttaggaagctgacatctcactatcttgtgtattccgagctaacgcaagtcaatcacttccactaacctctttattaaagttcgcaaaattacagtaggatcctattacttttcaggattctatataacagctaggagttggatattgtgacgtttaatttgaacttgaggtgagagaaacttcatgagaagtgcagttcatgcaatcctggtgtattagtctgttctcacactgctaataaagacatacccgaggtggggtaatttataaagaaaaagagtttaatggactcacagttccacatggctgaggaggcctcacaagcatggcagaagacaaaggaagagcagagggacttcttatatggcagcaggaaagagagaatgagaaccaagtgaaaggagtttccccttataaaatcatctgatctcgtgagactcattcactaccgtgagaacggtatgggggaaactgcccctgtgagtcaattatctcccaccaagtccctcccacaacatgtgggaattatgggagctacgattcaagatgagatttgggtgaggacacagccaaaccagccaaacctggtatgatctaaacccctctgatcccttccctaggagatggtggggaattgagtctgatgagagccggattagggacctggaagcagcatgtagaagtagatcggccgggcacagtggctcacgcctgtaatcccaatactttgggaggccgaagcaggcggatcacgaggtcaagagatggaaaccatcctggccaacatggtgaaaccccatctccactaaaaatacaaaaattagctgagggtattggcatgtgccggtaatcctagctactcaggaggctgaagcaggagaatcgcttgaaccagggagtcagaggttgcagtgagccgagattgcgccactacactccagcctgggtgacagagagagactccatctcaaaaaaaaaaaaagaaaaaagaactaaatcaagtgagtaactggccaagatcaaccatcaagggttgaaaatggagaagctgtttacatcctaagggtcagtgcatggccaagagtgggggactctgcaggaagtcaaaacaaaggtagaccagggaccagggtgggatgagggagacagcatctaggtctagggccatgaagagaggccctgggatccaaggaagccactcatgacacaaggtctagtcccagaagcctggaagagggtgacatccaaagcacagatggaaggatttcccttgaacaggacagggagggaaggtactgagactgacagctggagtagatgccttcataggtgttgttggggcagaaattgaaggcatccatgcctggtaacctgacattgctcagtgagtggtaggtgaggttgtctgctaaagagaagggtttgacaatggagtatggggcttgagtggtggcttgaaatagcccttgagtagcagagaagggggagacgaccaacagaagactgctgatacacactaagggccccactgagtagggagatcatggtttctcatggctccagcccacatggttgtgtgattttcccctgtatccttggaggtaggacgggaaaaattgattgactctgggcttgctgatcaggagttccagaacaacaagcaagtgaaatcattgaaggagacagaggggtcaaggggcaaagtggattaatttcctagattttcttttttacatttattgagaaacggttaaactttcaggcattggactaagcactttatatacaaaatctcatcaagttcttacaaaaatccattttccagctgaggaaactgatgacctgacattttaagtaagacagccaaagtcaccaagccagtaagtggggaacactgtgattgaacatattcttgtcactcactccaaatgccaccaatttagagacatcctagctagggcacctcagccacatggctgcagtcctggagggggtggggacagactgagaagacattgctcagtgtcattaacaataggtaggagccatgtcagtccacagaatgttttattaaactaattttttgcttatcgagatataatttgcataccataaaattcacccttttgcagcatgcagttcagagttttagtatattcacaggattttgcgaccatctccacttattccagaacatttcatcaccccagaaagaaacctcacacccattagcagccccttcctcccttcacctccaggcaatcactaatcagctttctgtctccacagatttgcttattctggacatttcacataaatagaatcatatgatatgtggcttcttttacttggcataatgttttacaaaaacaagtgataggttttttacatagaagtggattagtagagatttactttcctagaatgggtgtcatggtagaataaatatggccacaaattttttgtatggctccagaggaataaaacttggatccatggtagaagttccaaggaaacatattttgctttaatataagaaacttggctgggcgcagtggctcacacctgtaatctcagcactttgggaggccaaggcaggtggatcacctgaggtcaggagtttgagaccagcctggccaacatggtgaaaccccgtctctactaaaaatataaaaattggccgggtgtggtggtgcacacccgtagtcccagctactcgggaggctgaggcaggagaatcgcttcaacctgggaggtggagattgcagttgagctgagatggcaccactgcactccagcctgggtgacaaagagagacaccatctcaaatatatacacacatacatatatgaaacttatctagccatagaatggtagccttgcccaagaaatgttgacaagtctgcaggagttgggattgggaagatctggtaggaaagtagtacaagctatggctacatattaaaacccatttatgcctagtgttccattattgggacactaagcatgtgggagttatttatatcctactgctcaaggtcattgccaaggtctgattgcaaaaattcaaaaaactgcaacctcaggcatcaatgcgttaagaattcttgaataaatcagagctagagaatggggggaggaagacagagaaggagggaggaaaagaaagaagatagggagagagaagagaaagagagaagagagagggagggagagagtgaaggagagaaagaagagaaggaggaagagagagaaagaagaaagaagagagaggaagagagggagggagggagagtgaatgtgcaacctgtgttctcatctacaaaatgaggataacaatgtctcctcacatggagagggataaagcaggcaacgcagagcccagcacctcattggccctcgttgcatgtggatcgcctcctttggaacaatgtgctgggatccaaaatctgcacaaagccagtgagatcggtatgagcattgagtaggcgcgcccttgttctccatcactcagggtgaactgggttgaatgggggctccccaaaaatatatccccccagaacccgtgaacatgactgtttggaaaaagcgtctttgcagatataattaagttaaagatcctgagatgtgattatcctggattacctgggtgagccctatatctaatgacaagtgtccttaggagagacagagacacacagagaaggccatgggcagatggagacagagactagagagatatggccagaaacccaagaatgctaagggttcccggcagaagccaggaggggcaaggaacagacactgccccggggctgctggagggactgtgggcctgccgacaccaggatttcagacttccaccctccagagctgtgcaggaatagactgctgttgttttaagctatcaagtttgtggtcattgaatcagcagcctcccctccggaaactgagacagtgaacaagtgggaagcagtgacttgctcaggcaggcaggactgtgcccattcattacttcatctgtcttccttgcactcccatttccaaaggagaaatgagggactgcgcggcccagcagtgctagcagaagagagtgacccttaagcaccagagcgggggctgcagcctcctgggcccagccaggcaggctgggctggcattggagcccaagggaaagctgagcctccaccacagccccgatcactgttctgccacaagggcctgggggcttcccaccctgtctggagcccccttcctgctgaaatgtgactcggtatcttcccagaaaatttctcggaaaagcaaaaccaaggaggcccggaggcacttcctgaggctgattattgccccgtctttgacctctgctgtgaaattacagtgtccagtgtgtggctccttcttttctcatttttaaaaaagcctttcccagaaccactggggactggccctggtgcctcaaaccattgtaagtatttacaggaaatcattcagcggcactgcttatacgatacacatattgtgaaatgtaaagtgaggtcactgttcagtgactgggtagtagaaacaccccccggatcaacctgagacctggactcaaagaacttgggggaaatccagtgttgttttcatagcctcccccgacgtccaggttgttgctgggccgtctcaggactgttttgcaatctggtttctcgcccttttttttcttttttagctttaaaatttcatagatttttattaggttttttattattattattatactttaagttctgggatacatgtgtagaaggttcaggtttgctacataggtatacatatgccatggtggtttgctacacccatcaacccgttatctacattaggtatttctcctaatgctatccctccccttgcccctgaccccctgacaggccctggtgtatgatgttcccctccctgtgtccatgtgttctcattgttcaactctcacttatgagtgagaacatgcagtgtttgcttttctgttcctgtgttagtttgctgagaataatgatttccagcttcatccatgtccctgcaaaggacatgaactcattcttttttatggctgcatagtattccatggtgtatatgtgccacattttctttatccagtctatcattgatgggcatttgggttggtctctttttttttaaagcattcccaaaaagaacatctaaagatcactattattttcaatattaatttcattttcctgattatccagttgtggactccatgtggcatcagagtatggaggatttctattggtccttgctacacagacccatctgaatatcacatacaacttaaaccacttcagagacaaggttctgtcgtgatgacatgcaaacttcctcattcatccattcattcattcattcacccatcaattcattcattcatctgtgcacatgtttaagcatccgttcattcagcaagtcatctgataaatactgacagccttctgtgggaataccatggtgaacaaaatactctgctcccgtggaatttgccatgtgtcctggcagaaacaggaagagcaggcagcatgagagacacagagggcgagatgcctcatctgtccaggagtgtgcagggagctgagacctgaaggagaagtaggagtggaggtgaggattggtgtgttccagatgaggggaacagcccatgcaaagacccagaggcaagaaagaaagtgttgtttgttctaggagctgcaaatcatctacaaagtgggtggaaagtagcctgggagaggacaggtaggaggatgagactttgagaggccaaaaggccccataggcccccctgcagagttgaagcctcattctgcatttgagagggcctatactgaaaggtttgaagcagaggggtgagcaggccaatctgcacttcagaacggttgttctgggggcagtgaatgccaattggaaaaagtgagagcaacagaggaacttgcatgtgggtggtatccatagttctgctgagcgatggggtggagatgaggatggagagaaatgggtgcatctgagaggcactaaggaggtggaatggagaggccttagtctgattgaatgtggggtgagggaaaggggacagccaggcctgagccccagcttcctggctggcccagtacagtgagtgggtctcctgcacgcagaaaggctccttccgggcttggcacctgccaggatccaggcctgagaggccaaggccctcgtctgggacaggagtggcctgaatggaaagaaagaggtaggctcaagagatatttacaagaaaaagaaatcccttttgaagtgagatttctgacactccgaagtttttttttaaaaatcataatagtgtcatagaatgagtaattggattcccacgatggaggcgaagctccgggaggaaatgaaggaggacaacgtgaatcccagtgttgaaaccaagccagcaccaggcaggcaactcactcctgctatttttgcaagtgagatcctcctagaattctgtttctccaattgaaaccaaacagctaaatgttcccagagctgtagaggtgaaaatactctttgaggttaagtgaacggttcaaggacccaaaggtttggaacatggttgtcacatcagacccctgctcaggcctgtctttccaagtcgcctctctgtctttccaaagctgactctgagggctggtgctggagcagaaggagggttaaacagctcacatttttttgccagggctcccttttttttctctaccccatctccagctagtttccctccattcatttcccatccccatggcctagatttttcctactctcaacccttccatcaaaatgcattgcacgatcttgttccttcaggatcctgatggctcagctgggtggcagccatcatctaggtccacacaccaaccagagcaagacagcagtaagtgacactgtaacagcacacactgccatgtagtggccactccctagagcccaggtgtcgggctcagaatgtcactactgcagtcttggataatcactgcagtgatcctagaaacatacatgtaaatagtgtgctgtgccaaaacagaggaagcagaaacttaacaagtgtggctgagattaggtgagtaagccttgggctgctctgtgcagagatggatctagaagagtagcatgacaccaaactgcgggaagtctcgatgccaccataagggattctgatgtaattctaggagtcaagaggaatcactaaaggtatttaaagtatggtgtgaagtgaacacatgcgagcttcccagggtggactgcagagatcagagcctggtatcggggtgaaggctaaaaacacttaggacctgttaggcagtgacagaaggaatgaagaagaggaacaggtaaaagagttgtctcataggtgagacaggcaggacttggtagtatttgagagtaaaaaagactgatgggccctcaaaggtgactttggattttctctaatccgtgtgatgccatgcactgagacaaaggaacaggatgaggagtggatttaaggatagacaaaatgagtttggtttaagctacaatggaagttgaaatgccttgggagatccgtgggaagttgactacaggcagctggaaataagatctgaactcagaggagagattagggctagaggcgctgatcctggagtcatcagtcaaagggcgaaagtcgcctgggaaaggagtgactccaatagagaggagaactgaaaatcgagtttaaaaggccagtggaagaatacaggccaatcaagaaccctgagagggaggtgatggagaggagaaaggaaagactgggaaaggaggtacaaagccatctaggaaggtgtttcacgcaaagaattgtcaaccgcaggccgggtgcggtggctcatgcctgtcatcctagcactttaagaggctgaggcaggtggatcacctgaggccaggagtttgagaccagcctgaccaacatggtgaaaccccatctctactaaaaatacaaaaattagttgggcatggtggtgggtgcctgtaatcccagctactcgggaggctgaggcaggagaattgtttgaacccaggaggtggaggttgcagtgatcatgccactgcgctctagcctgggtgacatagccagaccctgtctcaaaaaaaaaaaataattcccgactgcagaattcaaatgctgcagaacagtcaggtacatgcaggaaccgagaagaggtgctgcattgtgcctcagcttcctcttctgtaaagaagagcttggactagatagtctctaacatttcctccagctccagagattgctgactgctgtgccttgatcccaccgagctcgatcactggggtgagcagttcatggagggtggtccctgtgcacaccctgcatggatgtgaggcagtgccaggcgcgtggtcatttacatcccctggtgtcccgggtttcccacgtgcgtgcttaggaccaccgcggactggacccacacttggattctcgcatttcattctcacaatagccttgtatactattaccctcatcttagaggtgggaaaactgagacttggcaagaaaaatcacttgcccaatgtcatgcagtcggtacagggtggagctgtgatttgagtccaacctgaataaatctaatgtggggtttgatggtaaaaccgtctttcttattcgcacactggaaatacctgtgtcatctttccgatcctggttcctggttcaaacaaggacattctccccttctttcttattcactatagttttcagtactgatcaaattgctgccatgagcttgtattactttgagcatcaggggtaaaaaagcttctaaaaataacataatctaaaggtaataggagttaaaaggggcaacctcccttcatggtttcaatcaagacttctctcctgagattaacaaatgtatgggtggggttaatattgtaacagtttcagcctatatcctaatcttgttcatgcaattgtaagcacccagaggccaaggaacaggccatctttttcctttttgttttttaaaacattttaattgagatataattcatgcaccatataattcacccatttaaagtgttcaattcaacagtttttattatactcacagatgcatgcaaccaccaccacagtcaattttagaacattttcatcacttcaaaaagcagccctggactccagctaccatccccctaggcagcccacccacccccagccactagtatacttccagcctctgtatattctcctgttccggactttcatacgaatggaattatataacatgtgatctgctatgattgacttctttcacttagcataatgttctcaaggttcatccatgttataacatctatcagtaatttattcctttttctggccaaataacattccattgtatggataccccatattttgtttattcatcttcaggtgatgaacactggggctgcttccacgtttgagctattatgagtaatgctgctatgaacattcacatgcaattgttgggtggacatatgttttcatttccctaggaataaaattaaggaaccagccatactcgttcctctttccaccacaatgcctagcactgtgtgccatgtgctgtgaggcctcaatggctatttgtctaagtgaatgaaaagaatacagttttcagcacaaggcatcaaagctaagggtccgttgggttccatagacacctccaaccacctttaagctgtgagtcctggcttcctcaccctggactaaaataaacttccaccttgtttcttattcactgtggctttgtttgtttctcctgtattttagggaccaatgaagcagccatcattgaaatcttatcgggcaggacatcagatgagaggcaacaaatcaagcaaaagtacaaggcaacgtacggcaaggtgattccaggggtggtcagcaagcttgcacccagccatggcctcagccgtctcggcttcctcatgtccccaggccacgcagaatatctttatagctttattgagtcagcccaggaggaaaagtgaaataaccacttaaaagcattaatggagttcagaaaaactgaaattgctttgttaactcaatagcctgtaaaatcaatactcttaaactcatttcttaaattgacttcatttttctatgaagaccctagtctttttttcacttaattgggactaactgtacatatgtagctagatcagtaatttgaaaatcagtttccacaagtgggtctttatacaggaatttttcataagcgattgttacagaaaactaccaaaaaaactctccattttattaagctatcaacacctatttttctttacattttctttcttttctttcattctttttattgttgaaaataattttatagagagaagtcttcaagtatgcattaggctttcttatttctttattaatatgtaatgaacacaacttaaacttttcttaatgtcattagaattatcattatgcaaaatgaatatcaattattatgctgtattctcatttatatttttcaaacttttaccatttcaatcactgtaggtataaatagatatatagaaagatgaagatgggttttcctatttatttgatactgagcaggtaacaattgcttcaggccttggtcttttcatggatagaaagaagatgataacttagctcccttctcaggttgctgggagaatcagtcaggataatgccagcatgtaccaatacaggaaaaagctatgatagctatgattgtttccattttacaaaatcacacacctaaaaaaaaaaaagagaaccaggactcacatccaagtctcacatccaagtctcctgacttcaagaacagtatccattcctggaggacccagtgccataaatagagctatttgcttgtacactaaatggcccaaatggctgtgcttttgtgctttttctgcttctctccttactattaggtgcgtcaatgtaatttttgatgaaaataagtgcatcttcagttcaactgcatttaattgaatgcatgaagctgaatgtgtgtgtggttttttttgttgttgttgttttgttttgttttgagacggagtctcactctgttgcccaggctggagtgtagtggcataatcttggctcactgtaacctctgcctcccgggttcaagcgattctcctgcctcagcctcctgagtagctgggattacaggcacgcgccaccatgcccagctaatttttgtgtttttagtaaaatttttgtattttaattttggtcaggctagtctcaaactcctgacttcgtgatctgcccacatcagcccaaagtgccaggattacaggtgtgagccaccgtgcctggcctgaagctgaatttttatccctgtcaacatccctaactccagtagcctcccaagacacattcaccctaccaatatgaaaagtcagtccaggcaaggtggctcacacctgtaatcccaacactttgggaggccaaggcaggaggatcacttgagcccaggagtttgagaccagttgagaccttcatctctaccaaaaataaaaaattagctgggcatggtggtgtgtgcctgtagtccctgctactcaggaggctgaggctggagggttgcttaagcccaagaagttgaggcctcagtgagccgtagttgcaccactgcactccagcctgggtgacagagagagaccctgtggaaaggaaagaaagaaaagaaaagaaaaagagagaaagggaggtggagaggaagggagagaagggaaggaaggaaagaaaaagaaagaacaaaagaatgaaagagagagagaaagaaagagaggaagaaggaaagaaagaaagaaaaatcggatacaatgcttcttaatctttagtctttagtctaaagaagagtaaatggattcaaactgaaagcctaggggccctgttaaaacttaaatgggcatgttctggcacaaaactttgtgatacttcatttgccaatcatttgcttactttctggttctcagctgtgtttcagagaactgagactgccaaacagataatctagaatcccaacaacgcaaagctagaagatgttaggtatgatccaatctcagccccgtgtcagttgacctccaaagagaataaccaccccgtggtaacagagtcagcaggaaaaccaggagtagagctgagctatcccgagccttctactctgtccagtcagaatgtaagcacacaaggatttgtttttatgcctgtggcttgtaagagtgggaagctgggatttttcttctctgcagcttatataatgcccatctggcctgaaaatatatttccaatttttagatgactccacaccatagagtactgaccacagacctgccttcacaagatgcagtgttggctggagcagccactgtggggcggaggcataatataacagcccccttgtaggactgcagatcccagggctttggacaaaaatattccgggtttttctcccaggccaagagctcagagcttcatttgaaaaatagttgatgtgcctcctcttagaaaatttttttcagcatgggagattaatgataagcatttattgaccgtttaaaatatgtcaggcagtaatgctcagtattgacaaggattgtcacatttaattctcccaaaaaccctgtgaggtcagtctagcactgtctccattttctagagctgaaaactgacagttggtgagattaagtacatttccaaggtcacaaaggtactgtggctgtgttctttgccaccatgccacactgctggggagctgcccaccctatgctatagtttgtgtccttgaaatgccagcttgtctatgggcctccaatctgagccatcccaggctgtcgctctatgtgaaggtctttggtttaagttagggcattaactactctaggtaggctgatgcccatccttgaccatttctcctgttaaaccacattgtcagagggagacagggagaaggtagttagttttcttgtgaaaagagggtgctcaaagaaaagaggaagacaggtgcttgtcagaatagatggcaggctggggtcatggtggctcacgcctataatcccagcactttgagaggctgaggtggaggatcgcttgagcctaggagtttgagattagcctggacaacatggcaaaaccccatctctacacaaaaaaatttaaaaattagccgagcatggcagtgtgtacctgtagtctcagctacttgggaggctgagatgggaggatcatctgagcccaggaggtcgaggctgcagtgagccatgattgcaccactgcactccagcctgggtgacaaagtcaccctgtctcaaacaaagaaaaaaacagatgccagtaagaattccatgtacttccccttctacatacctgcattcttcttcacctgtgtcccttccaggatttagcgagataacggaagtgacggtacaggccgtcgttcttcccatgacaatcctctttattcctgttatcctctgcaattgctaatagtgccccctttcacactgaaaggcatcccaatttggatgacaaattctccagtcctagagataacagccctgtatttcagcccttcctagctgaatatttggggaaaattcttcatcttatcaggttcaacagatcttgaggattttttcagcgatcttgaagactggctgaaaaagctctctgagctctcaaatgttccacagatactgttgttattgtgattcatcggtgaggtctccagccctgagcagggagctcctctctgcctctctgccagccctggggaaacgtggatgggcagctgagagcaggttgcatgttctcagcaggttgcaggttggcagaattcatgtccacagcacctttcttgtcaactatgagcacttgcaatagtgcaagcagacacctgcccctctcctcctgggccattcccagcacgtctctcactgtcttctggtaggagctggaggaagtactcaagagtgagctgagtggaaacttcgagaagacagcgttggcccttctggaccgtcccagcgagtacgccgcccggcagctgcagaaggctatgaagggtctgggcacagatgagtccgtcctcattgaggtcctgtgcacgaggaccaataaggtcagtcccagctgagcccgcaagggagcatcacacacccaatagagatggttgcagccccccagaagggaccctacttcccagcattctatccatggactgagcaggtgtctggggagacatatgtgtgcttggtccatgtgggaggacatctcttccagtcttccagaggtcagtcttggtgttgctgccacttaacagaatcgatcttttcagaagagctgtgtccagcgagcttctgcttttctaaactgatgcttttataagcaggaggcacaattctactttcccccacccagcctgactttgcggctcttctgacatgaaaaatcaacaagcagcccaagcatgcctgtgccactgcctgggctatggcggtcagctagcatagggtacaaaagagactataatgaggaagagaggtgagtggtgctgggggatgccagtgaacaccccagtggctgccagtactaccctgaagggttgtgtgtccttctgtcatcagacagagggatgtcactcggcacatgccacctttgcaggggctgaagagagcatttgttgaggccccatggagaactatttgtctctggctccagaagccaggagaaccaagggactcatcaagtcaagagggtccacaaataattcacaggagagacccctccctcttcagcaaccacacatgacagcagaatggggcagcccagcaaggaaaatgccagaagagcccaacattcttgaggcctctcagcaggaaatagaagcagatgttggagcagacagcaggcaaaatgcaaacagtgccctgacacaaaaatgcctggagaaggcctgggtgctgggccacgttcacgctgctcagcctcttttcctgaagtgccgccagggtccaggctacaggtgcaaaccttttctggagcatccccggacttcttttctccccacaagataataaaaatcctccatttcaaggagtctcaggttgggatgatgcttcggaggagggttagcacaggccccccgggagtgtgagttgaggccaagaggcacacaacttcccccactcagcatccacccttctcagaagcaccaaggtcccagcagggaggcagccaacgccagggcggtcagcacctgcctttgtgaaaaggttaattttaatcatatttttcaggccaggtacagtggttcacgcctgtaatcttagcactttgggagaccaaagcaggaggatcacttgaggtcagacggagtttgagaccagcctggctaacatgatgaaaccccgtctctactaaaaatacaaaaattagccaggtgtggcgccatgcatctgtaatcccagctacttgagaggctgaggcaggaggatcgcttgaacccgggaggcggaggttgcagtgagccaagattgtgccactgcactccagcctgagcgacagagcgagacttcgtctcaaaaaatatattcatatatatttttctaatctcatgtgatcatagctttttctccctcagcctagtttctttaagttcctggcttcaaccaataagcaaggcctctctatcaatcaaatagatctgatgggatgagaagaaaaacctgcagagagtgggtgccaggttcaggcagatcctggttgcgggttggaaggagaaaagggagggagctgcacaaacacaagtgatcagcctcccccagcacctagcctgcccttccctcccacccaggagcagtgaggctccccaccgctttctccccatcaccaccttctcccaatcaccacctactgactttcattttaaccagcttggtggtggggggggtgggggagcaggaagcctgctcttacaagctgctggttcaagtgtaaactgaggcagctcctgaggtgcaccccttggcaccagacattgaaatataaagcagtttctccaagaacacaccctcaagagaaactagcactcctgcacgcagccagtctgttactgaacgaagccttgtttgaaggagagaaaacttggaaacgacctaagcctccatcaataggaggttggctaagtaaaccgtagcttattgtagtatggaatattttgtgtccctttaaaaaactctaggtgactatccatgtacaagcatagctggatctccgggatactattattgagagaaaaactaagtcaaggaatgataggtacagtattccacctgctaaacacatgacacctatacaattctgttttcagtagcacatatatatacaaacgcaaaaaaaaaaatctgtgtatctttctgatacgcactgaacttctaacatgggttacctgagtggggaagagagagtgagaccaggcgaggaggtggtgaaagaaggtgttagcctagctgtaaacttctcacatttaaagaaagagaatgcatgcatttgtcacttgtgtgttagagatgtttgcagaggtgggcggagtggggggggggcgggccgtcacatctccagggactcgctccaggcgtgtgccctggacctatagggatgaccatcttaagaggaagtcttgaaggcactttgtgtccagacatggtctcccgcctcttctctctgtatctcttattgattaatccctccttggaatattgatttttttgtaaattaccttccctaggaaatcatcgccattaaagaggcctaccaaaggcgtaagtgacttttcattctggctttggataaagtatgtttctttcaaaatacctctgggaaactaaatcatctgctttcttccctccttgtttacttccttcgaagtatttgataggagcctcgaatcagatgtcaaaggtgatacaagtggaaacctaaaaaaaatcctggtgtctctgctgcaggtaagaggaaagaggtgtcacctgttttatcatcttaggaaagaatccttggcaacatggcaccatgatgaaaaagggtaacgtagataaacatttctttcttatattaaaaatattatcaagggattatcaacccatgctccatcagcccagctctggtgaaattatattcaattggaattacttccatataaacaatctgcctagtcatttgcagtttacaatcactttttgtaaatgaatcggctcattaagcatcactttgtcattttgccagtgaggaaatgtaggccatgagagggtgggtaacctgcccaggttcatgcagccagtaagagacagcccagaagcaagaaccagactatctgaccccaagcagggccgcttccacaacacaactctacaattacttccaggattcactggatcctgggcctgtaaggactacaacaagaaactcagccaggacatcagggctttcagaattggccctgctgggacacagccccccgagacctctagacagacacatctgtattcttatggacacactcatctttacgagctctgtgcattttctctgttttgtttctcccaatgggatacactgacagcagagaacagaagagagaggcttccactgcagcaggaagagagtttaagttttctcttgctgcataacaaatcgccacaaacttagcacctcagaacaacatagatctatcatctcacagtttccatgggtcaggagtccaagtagtatcttggagatccagctgaataatatttgggttcgctgagtcctttggtcaggttatcaacaggctgaaatcaaggtgtcggccagggctgccatctcatctgaggctcagagtcttcttccaagctcattaattgttggcagaattcatttccttatgtctgtgtttgatgtccccattttcttgctgttgaccagaagctactatcagctcctagagaccgccagcagctcccttccacacagtcccccaaggcagtgcaccacatggctgtttggtttcttccagtccagcagcagctcatctctctgacttcttccatctctgaccttttaagaagagctcattcatctgggtcaggccggccaaggataatctcccttttggtggactcagctgattggagacctgaattatatctgcaaaattcccctttgccattgaatataacacaatcacaggagtggcatctcctcacattcatagctctcacccacactcaagggaaggggattatacaaggatgtggaccattgggtcatcttagaattctgcccaccacaaagggctcaagttagacttccatgaccagctctcagggttttttaggactgggaccttgagtggtgaaatctgatattttgaaacgaagaggggactcattctagggaaaaccagagatcgcactcagtctgctcagaggtcagtggggtgtgtgggtgactctggtttctacaaaaaaaaaaaaaggcaaaaccaagtgttgccacagaagctcctctgtttatccattgtgcccaaaagatggcagcaaagagcaggtgtttcctccttgccaggctgaactgagctgagctgagaaagaattcacctctttctccaggactttgttttttttgttagtttgttttctgtggtcaagcaggaatgcaagttaataacaatgtgtcaatttttctaggctaatcgcaatgaaggagatgacgtggacaaagatctagctggtcaggatgccaaagatctgtatgatgtatgtgtgcagacatgccagtctctgcaaattctttttttaaatttattagcattattttcaacaaatgtttatttcatgcaaagaggagttacttgggaaataagaaacaaagatatgcttagatctttctagatcatatatatagtctccatgaatctaaatgaatggttcctattcttatactctggggttgaccacatcagatctgttttggaacaaagaatggtataaacaatataaataagtatgtgaaatacatttgtgggttagaagctgaaagtgcttagtccatttgacttctattcaatgcatagtttataatttcctgtcagtgaggcctagtcacagcactgcataatcagtcttttcacaaaagcctttttcaaagtgtttgtatttgacccttgaggcaggggaaggccgctggggcactgatgagcttgcgttcaatgaagtcctggccaagaggagctacaagcagttacgagccacctttcaagcctatcaaattgtaagtcataaagtattggggcaaaagagttcactctgaaagtgtcttaagttatttccaaaagaagccaagatctgcaataaggaattggggatcctttacaacagtggttctcaattggaggcgattttcctacctagggaatatttgataatgtctagaattatctggagttgtcacagctgggggtggtggccctggcatctagtgaacagaggcccgggatgccgctaaacagcctgcagtgcacaggacagcccaccaccaagaatcctccagccccagatgcagtacccaggctggaaaccggcttcacaacagacgccagggaagcaagtgtcccattcaggggagaagctctagagtccaagagtccaggtgcaaatcctgggtctaccactggcaagtgaccaaatctctccatcctgtttgtagaacaggaaccgtgaacatcatcttcacaccctcagagtgattttaaggttaaataagataaagactcagaacagttgagctggcatgtggcaagcatactaatgtttgctactattactccagtttacagttggctaacagtgcccaccattctcaagacagatatgaggtacctcaaagatagcctcctgaaaagatgcacataaattatattttaatcccaggataaatttaagcccacaaagcgagttagttatttcaaggcccttagcagtaagtccttccctgaaaagcagtctttacttgcaaaacgcctggagtggaatatcagattttttttttggcatcctattttatatgtgtagagtgcttttacctgctcaaagcacttctatgttctgtgtctcattcagtttcacaacaacagggtaactataatgtaggccgaacaactattgtgacccacaactgctggacaaggaaagtctgttgagtgaggaaccatctgtaacttatcaggaccacacagcaagttggtagcagagagtggatgagaactccaagactccccggcctgagctcctacctcagctgaagctggccactcctcactccaaatagcatttcctatgtgttgccagcagataaaaagacaataaagctttggaattttatcatgactgtatataagcctttagggcctgctcctttcaaatcgtgcccagagtcatgatcaaagacagctgaccctgcactcccctggtctcttgttcctggagctgcgtagcctctgagctggaggacttctctatgactgagatcctcctcccacactacggagcccacagatggagtttctgggtacgtgtgtgtgtgtgtatgaactgactacctgaaagtacactctccaggctaatatctcaaagttgatcctgaaacagcaccatcagcatcacttgagaatttgtttaaattgagaattctcagtccccaccagacctactgaatcagattccccggggctagggcctgaccatctgtgttagagcaggtgttccaggtgattttaatgtatattacagtttaagaagtcagctttaggctacagctgtatgtccttgtgcaagttattaagggttctgtgcctcggtttcccaaacgtaaaatagggataatagtacctacttcatagggttaataaggattaaatgagttaacagaaataagcagttagtccctggcatgcagtaggcgttcaatgaacattagcaattgtcgggcgtctccctgggtgaacagacagtgccaaaaatcagggctaaagcttatatgtacaataaggtaatctatggatttgatgattctttacatgaaaccagctctaaaatgctatctattcatccatttcaaaagccttgctcaagtgtcattcttgatatttattgctgatgtttttagagttcagcctgctcttagaccctggttctatgatttttctgatggcttctgaccaaaagcacagagatgctagtctgagatcactggagtttcttatgtggcatgagtcgtcctggcttagggttgaattttaattttcagcacaaaaactcagggttttgccatttatttatgctctaagcctgagtcttaacttctgacactcccagcaatcccaggccacgcaacagtttcccaaacttctgcatcatgcaggattattacagtccccagcgttaccaaatatgaaagacttatatagctataaaaccaaagtaaagtccccaaacagggctcagcataaacagtaggtatgcatacccatagcccactttgctgccacctcactgcgtgcctcaccctttgcccctcccctgtacatgttccttattccacgccagaggcttcagccctctaactgctatagtcagtgccagagcacagagggctctgctgtcagcgtgccgtccatttggggaaaccgattttcaaagaaagaaatgtctcccctgctcctctaataacctccctgcaggcattgctgcctgtttaactagagtcttagagacttgtttggaatctacccttataatgtgtttttctactgagatcagaaaatctgcttctgtacaaagagcccctaagaatcacgttgcagtaactgaagtgagaagtatccaaagtacagtcccaacagcttgggccagaccattgtttcagattgtgtcccacggagacgcctcagcagctaccaggagtagggtggggcaggaagcagacagggcagtaccttcttgttgcagtgtgtgaatagcgcctcctggagttgtgcaaggaaaaaacctgagcgggcaaaaacatggtatagatgccaatggcaagggaaaggagcccacctcccgcctcccagcacagctctgctttctgctttcatctgttttgtaggctgagattctacagaaaatttaaaatccctgctctagcctggtattaacaatagaaatggaaaacggtttaatgtgaggattttttaaagtaaacaagacctgtgtgaacaaaatgttctcttgaagtatgatctcagtctacagaacaagaaccttgtttctgggaaagggataccaatcccttccaaaataatgactcccacatcaaacccaaaaaagactgggggcagctaaggaagggacagttcccccactcttctaatctggtttctattgccacacaccaaggcctccagatatgcaaacaatgactaggagatcaagcaacagggcttcattaaatctggacacagttcctcccccgacatatattgtgcttacatcacaaagaacattttgtttacctgtgttttcaaaataaaccacataaactccactggtgcatactcaaagtccccaattatttatagaatcaattgtgtcatatcctcaaaagataatttctaagaaagaaatttcagtgtttctaatgcttaattgcatttctccaaacccagcaaagcattctcctttctctttatgtgcctgccctgagcttggcccgggcagtatttgtgttaaggatagtcacaatttactctgaacttcagcttctgtaaatatttagaaagaaacctaatgtgtaatgctgcgcagagcaatatgtgagccagtggtgaatataggattatttggaatcaccccagagtgaagacaagtggcattttgatgtggtcagcacccccggctcccagcccttgcagacccaccctctcaggaactttagatcaagttgttatcatgaacttcaccatgcctacttatttcactcaaactgtgactaagtccctggtcccaagacaagggagaggatggaggtgcatgtcagatgatcataaccacagcctcctgggaaattgaaactggaaagggtgaagaacacatgggaactaaactacacatcaatgttaaaaaaaaaatctatgattatagtatatataatatattaattatatatattataatatatattatatattaattgtttctccactcccaaattttacagatgaggaaattgaggttgagggagtggcactaaggtcaaatccattgggagtcaaatctagactgactcctcagcaacgagagccctctctcgaatgggtggcaaacaccccaatcctacaaggcaagagtcaggatagcagttccctgaagccacaggactaaatctggaaaacttgagtgctttttgtagaggaacaaccccaagagtactaaggtcaaaggcaaacctggaataacagttgattttggttttcgctgcagctcattggcaaagacatagaagaagccattgaagaagaaacatcaggcgacttgcagaaggcctatttaactctcggtaaagtaaagttaggagagctcctgtcttaggttgggctgcctggaaccagactcagacagaggtttgtgtgtaggaagatttgagggaatagcttttgggggtcaacaggtctaagcagcactgagcaagagagagagtgactgtgatgtagttgcaacaggggcgttgctgatcccacaggaagcttggaagctgagatgtccaaggtggagcaagggggccaggcttttgcaccccacatcaaacagtcatgtaacactggctgtaccaggggagcagtgcaactttgggcaagccagctctctcccttggagggagattcctggggagggactcagctgtgaatgactgcctcgatcctgaatagggcatctgagtggcacaccacagcatccattgcagtcctgctgtattagtccgttttcatgctgctgataaagacatagccaagatggggtaatttataaagaaaaagatgcttaatggactcacagttccacgtgcctggggaggcctcacaatcatggctgaagacggaaggcacagcttacatggtggcagacaaggcagaataagacccaagcgaaagaggaaaccccttataaaatcatcaaatctcgtgaaacttattcactaccatgagaaccgtatgaggggaaaccactcccatgattgaattatctcccactgggtccctcccacaacatgtgggaattgtgggagctataattcaagatgagatttgggtggggacacagccacaccatatcacccactaacaccatgggtccctgagggcacctgtcaacaacctagactgttatccagtttcaggcagcctgatagctcacaggtttccttttccatttggttcctttcaatgttttcaaataatgaagtttgtttggaaagagaggtgagggagatcagatcctgattgtgccaaccaaaccccaggacctcctctccaggtgttgcccaaaggcaggaaatagcagagagatgggcatggggctgtgtctgacaggctccttctttctttctgcaagccctggaatgaaggcattgtccattgtccacagtcctgtggtgaggaatccagggcaccaacccaaatggcagaaggaatggagagacctgttctcagaagaggaagaaccaaataagcagccctggaagttaaaaaatgtgctccagttgccaaactcttttgtttggtttctttggggtttttttgaacaatgtcagcaattgatttttttttaatccatccttattttgcattcaatgagcaagacctctgctgtgatatccggaggcctaaaaatccctggcattactcatgacccacactggatatatacacgagccctggtataagtgactgtgcttagggccttaagccatttatgccggaggttgcaattttttgaattgcagacatgtgtgaaaaattcagacctcggcgatgaccttgagcagtaggatataaataactcctacaagcttaacattccaataatggaacactaggcataattaagaagagtcttgagtagataataggatctactcacagcctggttctgaggctgtacgtccttgcttgctatacctgcattgtgagaatcgggaaaacaccagagtgcagtcagaagatggtattaaaactattcaatgatttaacatttactcagcacctgcctgggcccagggtttgtgctgggttgggaataagaggtaaataaggccagttcttgctcttaaggagcctaaagctcatggtggattttaagctggtgggtacaaatcaacagataaggctaaagataaagataaaaaaacaaagagcaaagatggtacagatgacagaaaagccaagtccctggggttgaggaccacacagtccaagagagagctgtactccagtggtagcgaaaaaaagtgattagaaaagaccttgagaataagccacacaaataacagaatacggcttcatgactattttctagacacttcccaccccgctcccacctaacttacagcgatgccagtttatgactaacatctaggagcagggggtgaggtcaaatggctcccaccacatccagcctctggagcagcatttctcaaagtgaggtctatggaccccctaccttggaatcacctgttacaatgcaggttcctgggccccactccaggttcccattgagaacctccaggaagggagcctgggaagccacacttctacaaactgtccaagtgactgtgttatactcactgaagttcaggaactcactctgaaggcaaaggggagcaagatatagagcaccgggctggctgcctttcctgccatttgctgtgaagaggtttttttctttctttctttctttcttttttttttttttaagacacagtttcactctgtcacccaggttagagtgcagtggtgcaatcttggcttactgcaacctctgcctcccgggttcaagtggttctcatgcctcagcttctcaagtaactgggattaccaagcctggctaatttttatgttattagtagagacggagtttcaccatgttggccaggctggtctcgaactcctgacctcaaatgatccacccacctcggcctcccaaagcgctgggattacaggtgtgagccaccatgcctggctgcagtgaataattttattccacatcttctttggctatccctgcccagccttttgagagattcctgctgctgctaacaacagaggttgttccccaagcatagattatagacaggagaaatgttgagagttttcttcctgaaatatcaggtagaaggaatgtcaagggagaagatccctgtgcaggagcggaacacggtgacttcaggcagacaatgatccccacatcaagccgtgctgtatggaagaggattttcaggaaaactttgtggtgctcattagctcaaattgtctggggatcacagtaagtcttgaatatgctactccccagaatagcatgcaagtttcccctgaaccaccaatccagcagcttttgggttgttctcaggagaaagaggccagacattgtttcttttccggtgcgattttcttttccactgaaactgtggcagctgccacatggcctgtaaaaggcggctggtccccaaactagactctccttcccgaactctgctcctctcccctgcttataagcatcaatcacacagacagtcccctagacaacaacagccccattatgggacatagtaagattgcacattccacatttatgctgaaataatcacttactgttaatcactaacatcatcaagtgttctagagaaatgttaacagcctaaagggcaaatattttttttttcctctaacgtgttagccatgatggattcatatgagcctgggaagaggggaaggaatgatttattcccaggagaagagatgcaccctgtcacctgcttgatgaatagagaccacgcttcattaagctgtagatagatcaaagctggaaggcaaggggaagccaggaaagagcaaatagcagcatcgtaggaaagtgatctttaaaaaggatcaaacatttcatcaagtccacatcccggattgcaaaccaaaagatcgtggggaacctggaaaaggttcagagatgaggcttgcaaaacaaccccagtgaggaaaaacaaagagtagggaggttgttgagcataggagagcaggcggctgtccaactggatacattgtcaagatgatgaagttttgttccagaaggttgctggccaatctgtttcccttcagaaccctaggacagcaccagagatttcactcgatagggaaagttatttctgctgggaaataacgagaatcatggacgtggccgggagggcccgaggatgccacagctctcctctagagggtcttcaggggacaggaggggagctatgcttgaagattccaggtgctctgaccagggaatcttccaaatctcatttcgcaacggtgtcaagtcagctcttttcacacctctgtctcaccatccagtcagctcgaagggcagccaggtgacatttaggggggtcccaaggtcattccacaaaacgtgaaagcctcacattctcttttcctttgtcctgcccagtgagatgtgcccaggattgtgaggactattttgctgaacgtctgtacaagtcgatgaagggtgcggggaccgatgaggagacgttgattcgcatagtcgtgaccagggccgaggtaagacacactccgactccaaagaggcggctgcaacttctcttttttccaccactgatgtcatcaacaaatagtttctattaagggcctatttacagaaaaagtaaaacagagacggccccttgccttcccagaatttgcagaagacattgtgctctgcttcaatctgtttctttttataaaaatacaataatgatcgttgcttctttttttgtcctctgtggctctggagagctagtggaggggcgcagaggcaaccatgtcgagcagttctcaggggctgcagctatgcatggctccatgttaaggaagacaaaacaaacacacttgaaagaggtcaaccagcagcaggaacaaaaagagaatgatttctgaattcctgagtgaggcctttccttaactgaacacactgcagaagcaagcacatcagcataaggcaatggttctcaatctttttaaaaactattgctgttctaaggaacctttttagacacgtgtttcttcattgccatcccttccccacaagaaatgttaacaccagagataatactacaaatctgtttatataccatgtggatatcagtgctttatacataaaaaaattaagggctttttcaccccctaaaaaccaatttgtgcttgctctcggagaatgtgtatgtataagaaagaaaagggagaggaagagccaacggcttgggagcagccgtcaagatcacagctggtcgggtgcaatggctcatgcctgtaatcccagcactttgggaggccgaggtgggtggatcgcctgaggtcaggagttcgagaccggcctggccaacatggtgaaaccccgtcactactaaaaatacaaaaattagctgggcatggtggcacacacttgtagtcccagctactcaggaggctgaggcatgagaattgcttgaacccagaaggtggaggttgcagtgagccaagatggtgccactacactccagtctgagtaacagagcgagactcggtctcaaaaaaaaaaaaaaaaaaaaggtcacagctaacagttcgggatatggggccacagacagaaggtggtacaaaataaaggggaagtggcatttcatcggcagcaggagaagccttggggaatgaagtggaactaagcacttgaaaaccacagacatcttccctcaaaaaaaaaaaaaaaaagtggttaaatgaagggggaggtgaagggggagggacaccaacccaaattctgatccatggcttcttaacaaataatgcttaacatctgacactgtttttaaatataactttgcaacaagatggttcttgcttttttatttctattcctggaatttctcctcccctcctttctcctcctccacaactcatctttttctattgaaggccatgtctctctctctcccctctttccctttgccagtctctctgctctgctcctgccatgcctctgcctctctcctccatggctccaaatccctctccctcctttctctccaggtcttctgccttgtccgtccctctgtctgttagcaactcgacctccagccaaagtcactgagagatgagagatcttgagggactcaaaagggacaggttgaacacaatgaagacccaggattccaaatgacccccagagagactggatccatccgaagggcttgtgagggttccgtgatcactccgacatggcccacggagtgttttattccaagaagctctgtcccatctcagaatcaaccacacgtcctgggccatctcaacatgtgggcagttacctcagaaggcttcaggcctggctagatatagtagtttggccagatttcctaatctcccaaagccacagaacagagccctgtgcaccccatccctacccaccctccaccttcctgcccgtgtcccagcacggggcaaggagccaagcagcggagcagggggacacacaggctgggggagagacagacaccacctgtctcctgtagtgtctgccacctgctccacatccactgcaaaccctccctcactcccccacatactcccatcctgatcatttctctcactgtctcagctcagccctctcactggggcaagagaagaaagaatcagatccctgagccacactttttgggtctggagtacaaggtagggtctaagccaaaaaagaaaagaaaagaaagactcctggttaaaaagagttctctgcttcttttatgagatccattatgttctacctggaattacatcttttctggtacaagtatcgtctcctttgctaggctgtaagaatcttctggcagagcaatctttggatttatttttctcctgagtcctatcatcacttctagcacctgggtttttcaagcttccaataaattagattcaaaataaatcctacaagttgctagtgatttgagttgtgttgactggtactaatatccttgctaatcatggtatgagggaaaaactgcttaattgcttaattccacatctctgtgttgacaattttcttagttttataccaggggtcaaccaactacagcctgcaggccaattcaggctcactgccaggttgtgtacagtcctgctagcttagggcaattcattttcaaataactgttaaaactcaaaagaaagataatactttgtaacatgtaaaaactgtatgaaattcaagagttttagggccaggcacggtggctcacgcctgtaatcccagcacttcgggagctgaggtgggtggatcacctgaggtcacgagttcgagaccagtctggccaacatgatgaaacccccgtctctactaaaaatacagaaaaaaattagccaggcatggtggttgactgtaatcccagctacttggggggctgaggcaggacaattgcttgaacccaggaggcggagattgcagtgagccgagactgcaccattgcactccagcctcggcaacaagagcaaagctctgtctcaaaaaaaaaaaaaaaaaaaaagaaattcaagagttttagtggaacacacacacacgtggacacctctgcaacctttggggaattgacctctgccttccctttcctgatcacaaaattgaaataacgtgataaaggaaataatgataggaaataaagccctatctcaagggctgttttaaggcatgaatgagcaaatgagtataacatgtgtagaacagtgcccactgtttgtgaacacaccataaacgttcttatctccattgctgttattttttctacaggtggaccttcaggggatcaaagcaaagttccaagagaagtatcagaagtctctctctgacatggttcgctcagatacctccggggacttccggaaactgctagtagccctcttgcactgagccaagccagggcaataggaacacagggtggaaccgcctttgtcaagagcacattccaaatcaaacttgcaaatgagactcccgcacgaaaacccttaagagtcccggattactttcttggcagcttaagtggcgcagccaggccaagctgtgtaagttaagggcagtaacgttaagatgcgtgggcagggcaccttgaactctggcttagcaagcatctaggctgcctcttcactttcttttagcatggtaactggatgttttctaaacactaatgaaatcagcagttgatgaaaaaactatgcatttgtaatggcacatttagaaggatatgcatcacacaagtaaggtacaggaaagacaaaattaaacaatttattaattttccttctgtgtgttcaatttgaaagcctcattgttaattaaagttgtggattatgcctcta

SEQ ID NO: 73 - DNA, 726 bp, synthetic construct
  source 1..726: mol_type = other DNA
gaagtgcagctgcagcagagcggcccggaactggaaaaaccgggcgcgagcgtgaaactgagctgcaaagcgagcggctatagctttaccggctataacatgaactgggtgaaacagagccatggcaaaagcctggaatggattggccatattgatccgtattatggcgataccagctataaccagaaatttcgcggcaaagcgaccctgaccgtggataaaagcagcagcaccgcgtatatgcagctgaaaagcctgaccagcgaagatagcgcggtgtattattgcgtgaaaggcggctattatggccattggtattttgatgtgtggggcgcgggcaccaccgtgaccgtgagcagcggcggaggcggctctggcggcggaggatcaggtggcggaggatccgatattcagatgacccagagcccgagcagcctgagcgcgagcctgggcgaacgcgtgagcctgacctgccgcgcgagccaggatattggcagcagcctgaactggctgcagcagggcccggatggcaccattaaacgcctgatttatgcgaccagcagcctggatagcggcgtgccgaaacgctttagcggcagccgcagcggcagcgattatagcctgaccattagcagcctggaaagcgaagattttgtggattattattgcctgcagtatgtgagcagcccgccgacctttggcgcgggcaccaaactggaactgaaa

SEQ ID NO: 74 - RNA, 1401 nt, Homo sapiens
  source 1..1401: mol_type = mRNA
agtgtgaaatcttcagagaagaatttctctttagttctttgcaagaaggtagagataaagacactttttcaaaaatggcaatggtatcagaattcctcaagcaggcctggtttattgaaaatgaagagcaggaatatgttcaaactgtgaagtcatccaaaggtggtcccggatcagcggtgagcccctatcctaccttcaatccatcctcggatgtcgctgccttgcataaggccataatggttaaaggtgtggatgaagcaaccatcattgacattctaactaagcgaaacaatgcacagcgtcaacagatcaaagcagcatatctccaggaaacaggaaagcccctggatgaaacactgaagaaagcccttacaggtcaccttgaggaggttgttttagctctgctaaaaactccagcgcaatttgatgctgatgaacttcgtgctgccatgaagggccttggaactgatgaagatactctaattgagattttggcatcaagaactaacaaagaaatcagagacattaacagggtctacagagaggaactgaagagagatctggccaaagacataacctcagacacatctggagattttcggaacgctttgctttctcttgctaagggtgaccgatctgaggactttggtgtgaatgaagacttggctgattcagatgccagggccttgtatgaagcaggagaaaggagaaaggggacagacgtaaacgtgttcaataccatccttaccaccagaagctatccacaacttcgcagagtgtttcagaaatacaccaagtacagtaagcatgacatgaacaaagttctggacctggagttgaaaggtgacattgagaaatgcctcacagctatcgtgaagtgcgccacaagcaaaccagctttctttgcagagaagcttcatcaagccatgaaaggtgttggaactcgccataaggcattgatcaggattatggtttcccgttctgaaattgacatgaatgatatcaaagcattctatcagaagatgtatggtatctccctttgccaagccatcctggatgaaaccaaaggagattatgagaaaatcctggtggctctttgtggaggaaactaaacattcccttgatggtctcaagctatgatcagaagactttaattatatattttcatcctataagcttaaataggaaagtttcttcaacaggattacagtgtagctacctacatgctgaaaaatatagcctttaaatcatttttatattataactctgtataatagagataagtccattttttaaaaatgttttccccaaaccataaaaccctatacaagttgttctagtaacaatacatgagaaagatgtctatgtagctgaaaataaaatgacgtcacaagacaa

SEQ ID NO: 75 - RNA, 1626 nt, Homo sapiens
  source 1..1626: mol_type = mRNA
gctcagcatttggggacgctctcagctctcggcgcacggcccaggtaagcggggcgcgccctgcccgcccgcgatgggccgccagctagcggggtgtggagacgctgggaagaaggcttccttcaaaatgtctactgttcacgaaatcctgtgcaagctcagcttggagggtgatcactctacacccccaagtgcatatgggtctgtcaaagcctatactaactttgatgctgagcgggatgctttgaacattgaaacagccatcaagaccaaaggtgtggatgaggtcaccattgtcaacattttgaccaaccgcagcaatgcacagagacaggatattgccttcgcctaccagagaaggaccaaaaaggaacttgcatcagcactgaagtcagccttatctggccacctggagacggtgattttgggcctattgaagacacctgctcagtatgacgcttctgagctaaaagcttccatgaaggggctgggaaccgacgaggactctctcattgagatcatctgctccagaaccaaccaggagctgcaggaaattaacagagtctacaaggaaatgtacaagactgatctggagaaggacattatttcggacacatctggtgacttccgcaagctgatggttgccctggcaaagggtagaagagcagaggatggctctgtcattgattatgaactgattgaccaagatgctcgggatctctatgacgctggagtgaagaggaaaggaactgatgttcccaagtggatcagcatcatgaccgagcggagcgtgccccacctccagaaagtatttgataggtacaagagttacagcccttatgacatgttggaaagcatcaggaaagaggttaaaggagacctggaaaatgctttcctgaacctggttcagtgcattcagaacaagcccctgtattttgctgatcggctgtatgactccatgaagggcaaggggacgcgagataaggtcctgatcagaatcatggtctcccgcagtgaagtggacatgttgaaaattaggtctgaattcaagagaaagtacggcaagtccctgtactattatatccagcaagacactaagggcgactaccagaaagcgctgctgtacctgtgtggtggagatgactgaagcccgacacggcctgagcgtccagaaatggtgctcaccatgcttccagctaacaggtctagaaaaccagcttgcgaataacagtccccgtggccatccctgtgagggtgacgttagcattacccccaacctcattttagttgcctaagcattgcctggccttcctgtctagtctctcctgtaagccaaagaaatgaacattccaaggagttggaagtgaagtctatgatgtgaaacactttgcctcctgtgtactgtgtcataaacagatgaataaactgaatttgtactttagaaacacgtactttgtggccctgctttcaactgaattgtttgaaaattaaacgtgcttggggttcagctggtgaggctgtccctgtaggaagaaagctctgggactgagctgtacagtatggttgcccctatccaagtgtcgctatttaagttaaatttaaatgaaataaaataaaataaaatca

SEQ ID NO: 76 - RNA, 1635 nt, Homo sapiens
  source 1..1635: mol_type = mRNA
gctcagcatttggggacgctctcagctctcggcgcacggcccaggttatcttgtagcatagcaacttcggatttcactctacccggagagtttcccgcttggttgaacacattggcctcaggaagcttccttcaaaatgtctactgttcacgaaatcctgtgcaagctcagcttggagggtgatcactctacacccccaagtgcatatgggtctgtcaaagcctatactaactttgatgctgagcgggatgctttgaacattgaaacagccatcaagaccaaaggtgtggatgaggtcaccattgtcaacattttgaccaaccgcagcaatgcacagagacaggatattgccttcgcctaccagagaaggaccaaaaaggaacttgcatcagcactgaagtcagccttatctggccacctggagacggtgattttgggcctattgaagacacctgctcagtatgacgcttctgagctaaaagcttccatgaaggggctgggaaccgacgaggactctctcattgagatcatctgctccagaaccaaccaggagctgcaggaaattaacagagtctacaaggaaatgtacaagactgatctggagaaggacattatttcggacacatctggtgacttccgcaagctgatggttgccctggcaaagggtagaagagcagaggatggctctgtcattgattatgaactgattgaccaagatgctcgggatctctatgacgctggagtgaagaggaaaggaactgatgttcccaagtggatcagcatcatgaccgagcggagcgtgccccacctccagaaagtatttgataggtacaagagttacagcccttatgacatgttggaaagcatcaggaaagaggttaaaggagacctggaaaatgctttcctgaacctggttcagtgcattcagaacaagcccctgtattttgctgatcggctgtatgactccatgaagggcaaggggacgcgagataaggtcctgatcagaatcatggtctcccgcagtgaagtggacatgttgaaaattaggtctgaattcaagagaaagtacggcaagtccctgtactattatatccagcaagacactaagggcgactaccagaaagcgctgctgtacctgtgtggtggagatgactgaagcccgacacggcctgagcgtccagaaatggtgctcaccatgcttccagctaacaggtctagaaaaccagcttgcgaataacagtccccgtggccatccctgtgagggtgacgttagcattacccccaacctcattttagttgcctaagcattgcctggccttcctgtctagtctctcctgtaagccaaagaaatgaacattccaaggagttggaagtgaagtctatgatgtgaaacactttgcctcctgtgtactgtgtcataaacagatgaataaactgaatttgtactttagaaacacgtactttgtggccctgctttcaactgaattgtttgaaaattaaacgtgcttggggttcagctggtgaggctgtccctgtaggaagaaagctctgggactgagctgtacagtatggttgcccctatccaagtgtcgctatttaagttaaatttaaatgaaataaaataaaataaaatca

SEQ ID NO: 77 - RNA, 1432 nt, Homo sapiens
  source 1..1432: mol_type = mRNA
agcgcggagcacctgcgcccgcggctgacaccttcgctcgcagtttgttcgcagtttactcgcacaccagtttcccccaccgcgctttggattagtgtgatctcagctcaaggcaaaggtgggatatcatggcatctatctgggttggacaccgaggaacagtaagagattatccagactttagcccatcagtggatgctgaagctattcagaaagcaatcagaggaattggaactgatgagaaaatgctcatcagcattctgactgagaggtcaaatgcacagcggcagctgattgttaaggaatatcaagcagcatatggaaaggagctgaaagatgacttgaagggtgatctctctggccactttgagcatctcatggtggccctagtgactccaccagcagtctttgatgcaaagcagctaaagaaatccatgaagggcgcgggaacaaacgaagatgccttgattgaaatcttaactaccaggacaagcaggcaaatgaaggatatctctcaagcctattatacagtatacaagaagagtcttggagatgacattagttccgaaacatctggtgacttccggaaagctctgttgactttggcagatggcagaagagatgaaagtctgaaagtggatgagcatctggccaaacaagatgcccagattctctataaagctggtgagaacagatggggcacggatgaagacaaattcactgagatcctgtgtttaaggagctttcctcaattaaaactaacatttgatgaatacagaaatatcagccaaaaggacattgtggacagcataaaaggagaattatctgggcattttgaagacttactgttggccatagttaattgtgtgaggaacacgccggcctttttagccgaaagactgcatcgagccttgaagggtattggaactgatgagtttactctgaaccgaataatggtgtccagatcagaaattgaccttttggacattcgaacagagttcaagaagcattatggctattccctatattcagcaattaaatcggatacttctggagactatgaaatcacactcttaaaaatctgtggtggagatgactgaaccaagaagataatctccaaaggtccacgatgggctttcccaacagctccaccttacttcttctcatactatttaagagaacaagcaaatataaacagcaacttgtgttcctaacaggaattttcattgttctataacaacaacaacaaaagcgattattattttagagcatctcatttataatgtagcagctcataaatgaaattgaaaatggtattaaagatctgcaactactatccaacttatatttctgctttcaaagttaagaatctttatagttctactccattaaatataaagcaagataataaaaattgttgcttttgttaaaa

SEQ ID NO: 78 - RNA, 4090 nt, Homo sapiens
  source 1..4090: mol_type = mRNA
gccggaagtgcccctcggggcggcgcggcgagggaccggggcctctcctgcaaccgccgttctgtcgccacggatgggaaggagtcgaccgcgagaagaggactgggggaagagggtctcagtgcagacagagttctggaaaagactgttgatatcacccgagccgcagggcaagctgggaaaggtagctcggcacagtccggctgctggactacaaatcccagcatactcctggaggagagggcgaggcggcagccgtgtggcctccacggcctcgaaggagatttgtggggtggcgcgtatgtggggactcggcaatttaaacacatcccgtgaagaaactgccaacaactaagttcccccccccccccccccgctgtatgttccacccttctggagccatcttatttgcggcctggcctcctggcacaagggattctggaggttgtggtttccgaacggatcgagactgacacctgaaggacgcggcttaaccgcttagcccctagcgggtcctgtgggtttcccgacgtctcctgggctgaaatggaagcgagaagtgatcgggaacattgtgctggcagttggatccggctgcaccgagcgccagccttgaaataagtaaaaccgatgcccttccgcccctaacctcaaaagctgcttttgcgtctcgatgttattgagagccggctctgcggtcagctctgagctaggcgctgtgagaacgctcagtaagacagtgtctcgtctggaaatgtacaggcgagattcaaaccgagaaactgccaaaggttgtgtgcagggcagatcctaggataccggagacccagcccgttggcttgacctcaaaactcgggggcttttcggcccatgctgtcccttaattcctcctcctttgctgacgctgtgggtgcgcatcaaagcctaaacttcactagctcccttgcacacaagaacactaaccctaacctgaccagttatttatttttcacttcaagattcttccattgatacttacgtttccctgataccgtccaagtgctgagggcggggatggactgtgtgatttgcatctgccaaatgcagaaaatttggaagttcacagcctcttagttggatgcccctgtgtcacagaacacattttggctatggggtgtgatctgtgtctgaggaacaacaagaagctacacgtcatccacacaggagccaaatctggaactctggtctcagttcttcaggactatttgagcgaataatcactcaacactggagtaaaggatgttctactagaagtcttattctgactcctaaaaccacgctaccgaaagtgttgatccacaaaccagtgccagtgcttgaactttgttactggtccacagttaggtcccctcagtgattcctgtgtgcacccagggttgagaactactgcataagaggtcctagaagatatctggtatggccagagtacagagggaccggagaagaacttctgcttgggtggctgaactctgatcttgacctagagtcatggccatggcaaccaaaggaggtactgtcaaagctgcttcaggattcaatgccatggaagatgcccagaccctgaggaaggccatgaaagggctcggcaccgatgaagacgccattattagcgtccttgcctaccgcaacaccgcccagcgccaggagatcaggacagcctacaagagcaccatcggcagggacttgatagacgacctgaagtcagaactgagtggcaacttcgagcaggtgattgtggggatgatgacgcccacggtgctgtatgacgtgcaagagctgcgaagggccatgaagggagccggcactgatgagggctgcctaattgagatcctggcctcccggacccctgaggagatccggcgcataagccaaacctaccagcagcaatatggacggagccttgaagatgacattcgctctgacacatcgttcatgttccagcgagtgctggtgtctctgtcagctggtgggagggatgaaggaaattatctggacgatgctctcgtgagacaggatgcccaggacctgtatgaggctggagagaagaaatgggggacagatgaggtgaaatttctaactgttctctgttcccggaaccgaaatcacctgttgcatgtgtttgatgaatacaaaaggatatcacagaaggatattgaacagagtattaaatctgaaacatctggtagctttgaagatgctctgctggctatagtaaagtgcatgaggaacaaatctgcatattttgctgaaaagctctataaatcgatgaagggcttgggcaccgatgataacaccctcatcagagtgatggtttctcgagcagaaattgacatgttggatatccgggcacacttcaagagactctatggaaagtctctgtactcgttcatcaagggtgacacatctggagactacaggaaagtactgcttgttctctgtggaggagatgattaaaataaaaatcccagaaggacaggaggattctcaacactttgaatttttttaacttcatttttctacactgctattatcattatctcagaatgcttatttccaattaaaacgcctacagctgcctcctagaatatagactgtctgtattattattcacctataattagtcattatgatgctttaaagctgtacttgcatttcaaagcttataagatataaatggagattttaaagtagaaataaatatgtattccatgtttttaaaagattactttctactttgtgtttcacagacattgaatatattaaattattccatattttcttttcagtgaaaaattttttaaatggaagactgttctaaaatcacttttttccctaatccaatttttagagtggctagtagtttcttcatttgaaattgtaagcatccggtcagtaagaatgcccatccagttttctatatttcatagtcaaagccttgaaagcatctacaaatctctttttttaggttttgtccatagcatcagttgatccttactaagtttttcatgggagacttccttcatcacatcttatgttgaaatcactttctgtagtcaaagtataccaaaaccaatttatctgaactaaattctaaagtatggttatacaaaccatatacatctggttaccaaacataaatgctgaacattccatattattatagttaatgtcttaatccagcttgcaagtgaatggaaaaaaaaataagcttcaaactaggtattctgggaatgatgtaatgctctgaatttagtatgatataaagaaaacttttttgtgctaaaaatactttttaaaatcaattttgttgattgtagtaatttctatttgcactgtgcctttcaactccagaaacattctgaagatgtacttggatttaattaaaaagttcactttgtaagaacgtggaaaaataattttaatttaaaaatggtgtttttaggccgggggcgggggctcacgccagtaatcccaacactttgggaggccaaggcgggtggatcacctaaggtcaggagttcaagactagcctggccaacatggagaaactgcatctctactaaaaatataaaaattagccgggtgtggtggctggtgcctgtaatcccagccactcggaggctgagtcagggagaactgcttgaacccaggaggcaggaggcaaaggttgcagtgagccgagatcacgccagcctgggcgacagagcgagaatccatctaaaaaaaaaaaaaaaaaaagtgtctttaaagtgaggtatagtctttctctgatccacttttcaccttctgaggtttttcatcttggcccctgaaaggagctatttttgaaggacttgtgttactcagtttctacaggaattacaagataagaaaaaaaaaatcatatttagtcttatgcgtgcctactggctaatgttcacatatgccaaacactactcaataacataaaataatgtatgaacttattctctggaaatgagtgatgccctctgctctaagtagaccatttatattaaatatcataaatgtataaaggacattcatattctta

SEQ ID NO: 79 - RNA, 2651 nt, Homo sapiens
  source 1..2651: mol_type = mRNA
gtgacctccgcagccgcagaggaggagcgcagcccggcctcgaagaacttctgcttgggtggctgaactctgatcttgacctagagtcatggccatggcaaccaaaggaggtactgtcaaagctgcttcaggattcaatgccatggaagatgcccagaccctgaggaaggccatgaaagggctcggcaccgatgaagacgccattattagcgtccttgcctaccgcaacaccgcccagcgccaggagatcaggacagcctacaagagcaccatcggcagggacttgatagacgacctgaagtcagaactgagtggcaacttcgagcaggtgattgtggggatgatgacgcccacggtgctgtatgacgtgcaagagctgcgaagggccatgaagggagccggcactgatgagggctgcctaattgagatcctggcctcccggacccctgaggagatccggcgcataagccaaacctaccagcagcaatatggacggagccttgaagatgacattcgctctgacacatcgttcatgttccagcgagtgctggtgtctctgtcagctggtgggagggatgaaggaaattatctggacgatgctctcgtgagacaggatgcccaggacctgtatgaggctggagagaagaaatgggggacagatgaggtgaaatttctaactgttctctgttcccggaaccgaaatcacctgttgcatgtgtttgatgaatacaaaaggatatcacagaaggatattgaacagagtattaaatctgaaacatctggtagctttgaagatgctctgctggctatagtaaagtgcatgaggaacaaatctgcatattttgctgaaaagctctataaatcgatgaagggcttgggcaccgatgataacaccctcatcagagtgatggtttctcgagcagaaattgacatgttggatatccgggcacacttcaagagactctatggaaagtctctgtactcgttcatcaagggtgacacatctggagactacaggaaagtactgcttgttctctgtggaggagatgattaaaataaaaatcccagaaggacaggaggattctcaacactttgaatttttttaacttcatttttctacactgctattatcattatctcagaatgcttatttccaattaaaacgcctacagctgcctcctagaatatagactgtctgtattattattcacctataattagtcattatgatgctttaaagctgtacttgcatttcaaagcttataagatataaatggagattttaaagtagaaataaatatgtattccatgtttttaaaagattactttctactttgtgtttcacagacattgaatatattaaattattccatattttcttttcagtgaaaaattttttaaatggaagactgttctaaaatcacttttttccctaatccaatttttagagtggctagtagtttcttcatttgaaattgtaagcatccggtcagtaagaatgcccatccagttttctatatttcatagtcaaagccttgaaagcatctacaaatctctttttttaggttttgtccatagcatcagttgatccttactaagtttttcatgggagacttccttcatcacatcttatgttgaaatcactttctgtagtcaaagtataccaaaaccaatttatctgaactaaattctaaagtatggttatacaaaccatatacatctggttaccaaacataaatgctgaacattccatattattatagttaatgtcttaatccagcttgcaagtgaatggaaaaaaaaataagcttcaaactaggtattctgggaatgatgtaatgctctgaatttagtatgatataaagaaaacttttttgtgctaaaaatactttttaaaatcaattttgttgattgtagtaatttctatttgcactgtgcctttcaactccagaaacattctgaagatgtacttggatttaattaaaaagttcactttgtaagaacgtggaaaaataattttaatttaaaaatggtgtttttaggccgggggcgggggctcacgccagtaatcccaacactttgggaggccaaggcgggtggatcacctaaggtcaggagttcaagactagcctggccaacatggagaaactgcatctctactaaaaatataaaaattagccgggtgtggtggctggtgcctgtaatcccagccactcggaggctgagtcagggagaactgcttgaacccaggaggcaggaggcaaaggttgcagtgagccgagatcacgccagcctgggcgacagagcgagaatccatctaaaaaaaaaaaaaaaaaaagtgtctttaaagtgaggtatagtctttctctgatccacttttcaccttctgaggtttttcatcttggcccctgaaaggagctatttttgaaggacttgtgttactcagtttctacaggaattacaagataagaaaaaaaaaatcatatttagtcttatgcgtgcctactggctaatgttcacatatgccaaacactactcaataacataaaataatgtatgaacttattctctggaaatgagtgatgccctctgctctaagtagaccatttatattaaatatcataaatgtataaaggacattcatattctta

SEQ ID NO: 80 - RNA, 2585 nt, Homo sapiens
  source 1..2585: mol_type = mRNA
gtgacctccgcagccgcagaggaggagcgcagcccggcctcgaagaacttctgcttgggtggctgaactctgatcttgacctagagtcatggccatggcaaccaaaggaggtactgtcaaagctgcttcaggattcaatgccatggaagatgcccagaccctgaggaaggccatgaaagggctcggcaccgatgaagacgccattattagcgtccttgcctaccgcaacaccgcccagcgccaggagatcaggacagcctacaagagcaccatcggcagggacttgatagacgacctgaagtcagaactgagtggcaacttcgagcagggagccggcactgatgagggctgcctaattgagatcctggcctcccggacccctgaggagatccggcgcataagccaaacctaccagcagcaatatggacggagccttgaagatgacattcgctctgacacatcgttcatgttccagcgagtgctggtgtctctgtcagctggtgggagggatgaaggaaattatctggacgatgctctcgtgagacaggatgcccaggacctgtatgaggctggagagaagaaatgggggacagatgaggtgaaatttctaactgttctctgttcccggaaccgaaatcacctgttgcatgtgtttgatgaatacaaaaggatatcacagaaggatattgaacagagtattaaatctgaaacatctggtagctttgaagatgctctgctggctatagtaaagtgcatgaggaacaaatctgcatattttgctgaaaagctctataaatcgatgaagggcttgggcaccgatgataacaccctcatcagagtgatggtttctcgagcagaaattgacatgttggatatccgggcacacttcaagagactctatggaaagtctctgtactcgttcatcaagggtgacacatctggagactacaggaaagtactgcttgttctctgtggaggagatgattaaaataaaaatcccagaaggacaggaggattctcaacactttgaatttttttaacttcatttttctacactgctattatcattatctcagaatgcttatttccaattaaaacgcctacagctgcctcctagaatatagactgtctgtattattattcacctataattagtcattatgatgctttaaagctgtacttgcatttcaaagcttataagatataaatggagattttaaagtagaaataaatatgtattccatgtttttaaaagattactttctactttgtgtttcacagacattgaatatattaaattattccatattttcttttcagtgaaaaattttttaaatggaagactgttctaaaatcacttttttccctaatccaatttttagagtggctagtagtttcttcatttgaaattgtaagcatccggtcagtaagaatgcccatccagttttctatatttcatagtcaaagccttgaaagcatctacaaatctctttttttaggttttgtccatagcatcagttgatccttactaagtttttcatgggagacttccttcatcacatcttatgttgaaatcactttctgtagtcaaagtataccaaaaccaatttatctgaactaaattctaaagtatggttatacaaaccatatacatctggttaccaaacataaatgctgaacattccatattattatagttaatgtcttaatccagcttgcaagtgaatggaaaaaaaaataagcttcaaactaggtattctgggaatgatgtaatgctctgaatttagtatgatataaagaaaacttttttgtgctaaaaatactttttaaaatcaattttgttgattgtagtaatttctatttgcactgtgcctttcaactccagaaacattctgaagatgtacttggatttaattaaaaagttcactttgtaagaacgtggaaaaataattttaatttaaaaatggtgtttttaggccgggggcgggggctcacgccagtaatcccaacactttgggaggccaaggcgggtggatcacctaaggtcaggagttcaagactagcctggccaacatggagaaactgcatctctactaaaaatataaaaattagccgggtgtggtggctggtgcctgtaatcccagccactcggaggctgagtcagggagaactgcttgaacccaggaggcaggaggcaaaggttgcagtgagccgagatcacgccagcctgggcgacagagcgagaatccatctaaaaaaaaaaaaaaaaaaagtgtctttaaagtgaggtatagtctttctctgatccacttttcaccttctgaggtttttcatcttggcccctgaaaggagctatttttgaaggacttgtgttactcagtttctacaggaattacaagataagaaaaaaaaaatcatatttagtcttatgcgtgcctactggctaatgttcacatatgccaaacactactcaataacataaaataatgtatgaacttattctctggaaatgagtgatgccctctgctctaagtagaccatttatattaaatatcataaatgtataaaggacattcatattctta

SEQ ID NO: 81 - RNA, 2686 nt, Homo sapiens
  source 1..2686: mol_type = mRNA
gtgacctccgcagccgcagaggaggagcgcagcccggcctcgaagaacttctgcttgggtggctgaactctgatcttgacctagagtcatggccatgcacaaacaacgaggaaacagaagattcaccaaacatttatgaacagccagctgttataaagacaagggaccaatctgaaaaatcagaataaagtctccttgttaaagctgctgcaagaaacaggcaccgatgaagacgccattattagcgtccttgcctaccgcaacaccgcccagcgccaggagatcaggacagcctacaagagcaccatcggcagggacttgatagacgacctgaagtcagaactgagtggcaacttcgagcaggtgattgtggggatgatgacgcccacggtgctgtatgacgtgcaagagctgcgaagggccatgaagggagccggcactgatgagggctgcctaattgagatcctggcctcccggacccctgaggagatccggcgcataagccaaacctaccagcagcaatatggacggagccttgaagatgacattcgctctgacacatcgttcatgttccagcgagtgctggtgtctctgtcagctggtgggagggatgaaggaaattatctggacgatgctctcgtgagacaggatgcccaggacctgtatgaggctggagagaagaaatgggggacagatgaggtgaaatttctaactgttctctgttcccggaaccgaaatcacctgttgcatgtgtttgatgaatacaaaaggatatcacagaaggatattgaacagagtattaaatctgaaacatctggtagctttgaagatgctctgctggctatagtaaagtgcatgaggaacaaatctgcatattttgctgaaaagctctataaatcgatgaagggcttgggcaccgatgataacaccctcatcagagtgatggtttctcgagcagaaattgacatgttggatatccgggcacacttcaagagactctatggaaagtctctgtactcgttcatcaagggtgacacatctggagactacaggaaagtactgcttgttctctgtggaggagatgattaaaataaaaatcccagaaggacaggaggattctcaacactttgaatttttttaacttcatttttctacactgctattatcattatctcagaatgcttatttccaattaaaacgcctacagctgcctcctagaatatagactgtctgtattattattcacctataattagtcattatgatgctttaaagctgtacttgcatttcaaagcttataagatataaatggagattttaaagtagaaataaatatgtattccatgtttttaaaagattactttctactttgtgtttcacagacattgaatatattaaattattccatattttcttttcagtgaaaaattttttaaatggaagactgttctaaaatcacttttttccctaatccaatttttagagtggctagtagtttcttcatttgaaattgtaagcatccggtcagtaagaatgcccatccagttttctatatttcatagtcaaagccttgaaagcatctacaaatctctttttttaggttttgtccatagcatcagttgatccttactaagtttttcatgggagacttccttcatcacatcttatgttgaaatcactttctgtagtcaaagtataccaaaaccaatttatctgaactaaattctaaagtatggttatacaaaccatatacatctggttaccaaacataaatgctgaacattccatattattatagttaatgtcttaatccagcttgcaagtgaatggaaaaaaaaataagcttcaaactaggtattctgggaatgatgtaatgctctgaatttagtatgatataaagaaaacttttttgtgctaaaaatactttttaaaatcaattttgttgattgtagtaatttctatttgcactgtgcctttcaactccagaaacattctgaagatgtacttggatttaattaaaaagttcactttgtaagaacgtggaaaaataattttaatttaaaaatggtgtttttaggccgggggcgggggctcacgccagtaatcccaacactttgggaggccaaggcgggtggatcacctaaggtcaggagttcaagactagcctggccaacatggagaaactgcatctctactaaaaatataaaaattagccgggtgtggtggctggtgcctgtaatcccagccactcggaggctgagtcagggagaactgcttgaacccaggaggcaggaggcaaaggttgcagtgagccgagatcacgccagcctgggcgacagagcgagaatccatctaaaaaaaaaaaaaaaaaaagtgtctttaaagtgaggtatagtctttctctgatccacttttcaccttctgaggtttttcatcttggcccctgaaaggagctatttttgaaggacttgtgttactcagtttctacaggaattacaagataagaaaaaaaaaatcatatttagtcttatgcgtgcctactggctaatgttcacatatgccaaacactactcaataacataaaataatgtatgaacttattctctggaaatgagtgatgccctctgctctaagtagaccatttatattaaatatcataaatgtataaaggacattcatattctta

SEQ ID NO: 82 - RNA, 1638 nt, Homo sapiens
  source 1..1638: mol_type = mRNA
agtctaggtgcagctgccggatccttcagcgtctgcatctcggcgtcgccccgcgtaccgtcgcccggctctccgccgctctcccggggtttcggggcacttgggtcccacagtctggtcctgcttcaccttcccctgacctgagtagtcgccatggcacaggttctcagaggcactgtgactgacttccctggatttgatgagcgggctgatgcagaaactcttcggaaggctatgaaaggcttgggcacagatgaggagagcatcctgactctgttgacatcccgaagtaatgctcagcgccaggaaatctctgcagcttttaagactctgtttggcagggatcttctggatgacctgaaatcagaactaactggaaaatttgaaaaattaattgtggctctgatgaaaccctctcggctttatgatgcttatgaactgaaacatgccttgaagggagctggaacaaatgaaaaagtactgacagaaattattgcttcaaggacacctgaagaactgagagccatcaaacaagtttatgaagaagaatatggctcaagcctggaagatgacgtggtgggggacacttcagggtactaccagcggatgttggtggttctccttcaggctaacagagaccctgatgctggaattgatgaagctcaagttgaacaagatgctcaggctttatttcaggctggagaacttaaatgggggacagatgaagaaaagtttatcaccatctttggaacacgaagtgtgtctcatttgagaaaggtgtttgacaagtacatgactatatcaggatttcaaattgaggaaaccattgaccgcgagacttctggcaatttagagcaactactccttgctgttgtgaaatctattcgaagtatacctgcctaccttgcagagaccctctattatgctatgaagggagctgggacagatgatcataccctcatcagagtcatggtttccaggagtgagattgatctgtttaacatcaggaaggagtttaggaagaattttgccacctctctttattccatgattaagggagatacatctggggactataagaaagctcttctgctgctctgtggagaagatgactaacgtgtcacggggaagagctccctgctgtgtgcctgcaccaccccactgccttccttcagcacctttagctgcatttgtatgccagtgcttaacacattgccttattcatactagcatgctcatgaccaacacatacacgtcatagaagaaaatagtggtgcttctttctgatctctagtggagatctctttgactgctgtagtactaaagtgtacttaatgttactaagtttaatgcctggccattttccatttatatatattttttaagaggctagagtgcttttagccttttttaaaaactccatttatattacatttgtaaccatgatactttaatcagaagcttagccttgaaattgtgaactcttggaaatgttattagtgaagttcgcaactaaactaaacctgtaaaattatgatgattgtattcaaaagattaatgaaaaataaacatttctgtccccctgaattatgtgtacatgtgtgtttagatttattattaaatttatttaacaatgtt

SEQ ID NO: 83 - RNA, 2889 nt, Homo sapiens
  source 1..2889: mol_type = mRNA
gcggttgctgctgggctaacgggctccgatccagcgagcgctgcgtcctcgagtccctgcgcccgtgcgtccgtctgcgacccgaggcctccgctgcgcgtggattctgctgcgaaccggagaccatggccaaaccagcacagggtgccaagtaccggggctccatccatgacttcccaggctttgaccccaaccaggatgccgaggctctgtacactgccatgaagggctttggcagtgacaaggaggccatactggacataatcacctcacggagcaacaggcagaggcaggaggtctgccagagctacaagtccctctacggcaaggacctcattgctgatttaaagtatgaattgacgggcaagtttgaacggttgattgtgggcctgatgaggccacctgcctattgtgatgccaaagaaattaaagatgccatctcgggcattggcactgatgagaagtgcctcattgagatcttggcttcccggaccaatgagcagatgcaccagctggtggcagcatacaaagatgcctacgagcgggacctggaggctgacatcatcggcgacacctctggccacttccagaagatgcttgtggtcctgctccagggaaccagggaggaggatgacgtagtgagcgaggacctggtacaacaggatgtccaggacctatacgaggcaggggaactgaaatggggaacagatgaagcccagttcatttacatcttgggaaatcgcagcaagcagcatcttcggttggtgttcgatgagtatctgaagaccacagggaagccgattgaagccagcatccgaggggagctgtctggggactttgagaagctaatgctggccgtagtgaagtgtatccggagcaccccggaatattttgctgaaaggctcttcaaggctatgaagggcctggggactcgggacaacaccctgatccgcatcatggtctcccgtagtgagttggacatgctcgacattcgggagatcttccggaccaagtatgagaagtccctctacagcatgatcaagaatgacacctctggcgagtacaagaagactctgctgaagctgtctgggggagatgatgatgctgctggccagttcttcccggaggcagcgcaggtggcctatcagatgtgggaacttagtgcagtggcccgagtagagctgaagggaactgtgcgcccagccaatgacttcaaccctgacgcagatgccaaagcgctgcggaaagccatgaagggactcgggactgacgaagacacaatcatcgatatcatcacgcaccgcagcaatgtccagcggcagcagatccggcagaccttcaagtctcactttggccgggacttaatgactgacctgaagtctgagatctctggagacctggcaaggctgattctggggctcatgatgccaccggcccattacgatgccaagcagttgaagaaggccatggagggagccggcacagatgaaaaggctcttattgaaatcctggccactcggaccaatgctgaaatccgggccatcaatgaggcctataaggaggactatcacaagtccctggaggatgctctgagctcagacacatctggccacttcaggaggatcctcatttctctggccacggggcatcgtgaggagggaggagaaaacctggaccaggcacgggaagatgcccaggtggctgctgagatcttggaaatagcagacacacctagtggagacaaaacttccttggagacacgtttcatgacgatcctgtgtacccggagctatccgcacctccggagagtcttccaggagttcatcaagatgaccaactatgacgtggagcacaccatcaagaaggagatgtctggggatgtcagggatgcatttgtggccattgttcaaagtgtcaagaacaagcctctcttctttgccgacaaactttacaaatccatgaagggtgctggcacagatgagaagactctgaccaggatcatggtatcccgcagtgagattgacctgctcaacatccggagggaattcattgagaaatatgacaagtctctccaccaagccattgagggtgacacctccggagacttcctgaaggccttgctggctctctgtggtggtgaggactagggccacagctttggcgggcacttctgccaagaaatggttatcagcaccagccgccatggccaagcctgattgttccagctccagagactaaggaaggggcaggggtggggggaggggttgggttgggctcttatcttcagtggagcttaggaaacgctcccactcccacgggccatcgagggcccagcacggctgagcggctgaaaaaccgtagccatagatcctgtccacctccactcccctctgaccctcaggctttcccagcttcctccccttgctacagcctctgccctggtttgggctatgtcagatccaaaaacatcctgaacctctgtctgtaaaatgagtagtgtctgtactttgaatgagggggttggtggcaggggccagttgaatgtgctgggcggggtggtgggaaggatagtaaatgtgctggggcaaactgacaaatcttcccatccatttcaccacccatctccatccaggccgcgctagagtactggaccaggaatttggatgcctgggttcaaatctgcatctgccatgcacttgtttctgaccttaggccagcccctttccctccctgagtctctattttcttatctacaatgagacagttggacaaaaaaatcttggcttcccttctaacattaacttcctaaagtatgcctccgattcattcccttgacactttttatttctaaggaagaaataaaaagagatacacaaacacataaacaca

SEQ ID NO: 84 - RNA, 2898 nt, Homo sapiens
  source 1..2898: mol_type = mRNA
atacctcagaggagccagcctctgcagacagagaccagagagcatccagaggcctggccggggtcctgcagtgcagacgttgggaggcacggagacggggagagggggaggcggtccaggactcactctgctccacctctgactccttgaagggtgccaagtaccggggctccatccatgacttcccaggctttgaccccaaccaggatgccgaggctctgtacactgccatgaagggctttggcagtgacaaggaggccatactggacataatcacctcacggagcaacaggcagaggcaggaggtctgccagagctacaagtccctctacggcaaggacctcattgctgatttaaagtatgaattgacgggcaagtttgaacggttgattgtgggcctgatgaggccacctgcctattgtgatgccaaagaaattaaagatgccatctcgggcattggcactgatgagaagtgcctcattgagatcttggcttcccggaccaatgagcagatgcaccagctggtggcagcatacaaagatgcctacgagcgggacctggaggctgacatcatcggcgacacctctggccacttccagaagatgcttgtggtcctgctccagggaaccagggaggaggatgacgtagtgagcgaggacctggtacaacaggatgtccaggacctatacgaggcaggggaactgaaatggggaacagatgaagcccagttcatttacatcttgggaaatcgcagcaagcagcatcttcggttggtgttcgatgagtatctgaagaccacagggaagccgattgaagccagcatccgaggggagctgtctggggactttgagaagctaatgctggccgtagtgaagtgtatccggagcaccccggaatattttgctgaaaggctcttcaaggctatgaagggcctggggactcgggacaacaccctgatccgcatcatggtctcccgtagtgagttggacatgctcgacattcgggagatcttccggaccaagtatgagaagtccctctacagcatgatcaagaatgacacctctggcgagtacaagaagactctgctgaagctgtctgggggagatgatgatgctgctggccagttcttcccggaggcagcgcaggtggcctatcagatgtgggaacttagtgcagtggcccgagtagagctgaagggaactgtgcgcccagccaatgacttcaaccctgacgcagatgccaaagcgctgcggaaagccatgaagggactcgggactgacgaagacacaatcatcgatatcatcacgcaccgcagcaatgtccagcggcagcagatccggcagaccttcaagtctcactttggccgggacttaatgactgacctgaagtctgagatctctggagacctggcaaggctgattctggggctcatgatgccaccggcccattacgatgccaagcagttgaagaaggccatggagggagccggcacagatgaaaaggctcttattgaaatcctggccactcggaccaatgctgaaatccgggccatcaatgaggcctataaggaggactatcacaagtccctggaggatgctctgagctcagacacatctggccacttcaggaggatcctcatttctctggccacggggcatcgtgaggagggaggagaaaacctggaccaggcacgggaagatgcccaggtggctgctgagatcttggaaatagcagacacacctagtggagacaaaacttccttggagacacgtttcatgacgatcctgtgtacccggagctatccgcacctccggagagtcttccaggagttcatcaagatgaccaactatgacgtggagcacaccatcaagaaggagatgtctggggatgtcagggatgcatttgtggccattgttcaaagtgtcaagaacaagcctctcttctttgccgacaaactttacaaatccatgaagggtgctggcacagatgagaagactctgaccaggatcatggtatcccgcagtgagattgacctgctcaacatccggagggaattcattgagaaatatgacaagtctctccaccaagccattgagggtgacacctccggagacttcctgaaggccttgctggctctctgtggtggtgaggactagggccacagctttggcgggcacttctgccaagaaatggttatcagcaccagccgccatggccaagcctgattgttccagctccagagactaaggaaggggcaggggtggggggaggggttgggttgggctcttatcttcagtggagcttaggaaacgctcccactcccacgggccatcgagggcccagcacggctgagcggctgaaaaaccgtagccatagatcctgtccacctccactcccctctgaccctcaggctttcccagcttcctccccttgctacagcctctgccctggtttgggctatgtcagatccaaaaacatcctgaacctctgtctgtaaaatgagtagtgtctgtactttgaatgagggggttggtggcaggggccagttgaatgtgctgggcggggtggtgggaaggatagtaaatgtgctggggcaaactgacaaatcttcccatccatttcaccacccatctccatccaggccgcgctagagtactggaccaggaatttggatgcctgggttcaaatctgcatctgccatgcacttgtttctgaccttaggccagcccctttccctccctgagtctctattttcttatctacaatgagacagttggacaaaaaaatcttggcttcccttctaacattaacttcctaaagtatgcctccgattcattcccttgacactttttatttctaaggaagaaataaaaagagatacacaaacacataaacaca

SEQ ID NO: 85 - RNA, 2871 nt, Homo sapiens
  source 1..2871: mol_type = mRNA
gcggttgctgctgggctaacgggctccgatccagcgagcgctgcgtcctcgagtccctgcgcccgtgcgtccgtctgcgacccgaggcctccgctgcgcgtggattctgctgcgaaccggagaccatggccaaaccagcacagggtgccaagtaccggggctccatccatgacttcccaggctttgaccccaaccaggatgccgaggctctgtacactgccatgaagggctttggcagtgacaaggaggccatactggacataatcacctcacggagcaacaggcagaggcaggaggtctgccagagctacaagtccctctacggcaaggacctcattgctgatttaaagtatgaattgacgggcaagtttgaacggttgattgtgggcctgatgaggccacctgcctattgtgatgccaaagaaattaaagatgccatctcgggcattggcactgatgagaagtgcctcattgagatcttggcttcccggaccaatgagcagatgcaccagctggtggcagcatacaaagatgcctacgagcgggacctggaggctgacatcatcggcgacacctctggccacttccagaagatgcttgtggtcctgctccagggaaccagggaggaggatgacgtagtgagcgaggacctggtacaacaggatgtccaggacctatacgaggcaggggaactgaaatggggaacagatgaagcccagttcatttacatcttgggaaatcgcagcaagcagcatcttcggttggtgttcgatgagtatctgaagaccacagggaagccgattgaagccagcatccgaggggagctgtctggggactttgagaagctaatgctggccgtagtgaagtgtatccggagcaccccggaatattttgctgaaaggctcttcaaggctatgaagggcctggggactcgggacaacaccctgatccgcatcatggtctcccgtagtgagttggacatgctcgacattcgggagatcttccggaccaagtatgagaagtccctctacagcatgatcaagaatgacacctctggcgagtacaagaagactctgctgaagctgtctgggggagatgatgatgctgctggccagttcttcccggaggcagcgcaggtggcctatcagatgtgggaacttagtgcagtggcccgagtagagctgaagggaactgtgcgcccagccaatgacttcaaccctgacgcagatgccaaagcgctgcggaaagccatgaagggactcgggactgacgaagacacaatcatcgatatcatcacgcaccgcagcaatgtccagcggcagcagatccggcagaccttcaagtctcactttggccgggacttaatgactgacctgaagtctgagatctctggagacctggcaaggctgattctggggctcatgatgccaccggcccattacgatgccaagcagttgaagaaggccatggagggagccggcacagatgaaaaggctcttattgaaatcctggccactcggaccaatgctgaaatccgggccatcaatgaggcctataaggaggactatcacaagtccctggaggatgctctgagctcagacacatctggccacttcaggaggatcctcatttctctggccacggggcatcgtgaggagggaggagaaaacctggaccaggcacgggaagatgcccaggaaatagcagacacacctagtggagacaaaacttccttggagacacgtttcatgacgatcctgtgtacccggagctatccgcacctccggagagtcttccaggagttcatcaagatgaccaactatgacgtggagcacaccatcaagaaggagatgtctggggatgtcagggatgcatttgtggccattgttcaaagtgtcaagaacaagcctctcttctttgccgacaaactttacaaatccatgaagggtgctggcacagatgagaagactctgaccaggatcatggtatcccgcagtgagattgacctgctcaacatccggagggaattcattgagaaatatgacaagtctctccaccaagccattgagggtgacacctccggagacttcctgaaggccttgctggctctctgtggtggtgaggactagggccacagctttggcgggcacttctgccaagaaatggttatcagcaccagccgccatggccaagcctgattgttccagctccagagactaaggaaggggcaggggtggggggaggggttgggttgggctcttatcttcagtggagcttaggaaacgctcccactcccacgggccatcgagggcccagcacggctgagcggctgaaaaaccgtagccatagatcctgtccacctccactcccctctgaccctcaggctttcccagcttcctccccttgctacagcctctgccctggtttgggctatgtcagatccaaaaacatcctgaacctctgtctgtaaaatgagtagtgtctgtactttgaatgagggggttggtggcaggggccagttgaatgtgctgggcggggtggtgggaaggatagtaaatgtgctggggcaaactgacaaatcttcccatccatttcaccacccatctccatccaggccgcgctagagtactggaccaggaatttggatgcctgggttcaaatctgcatctgccatgcacttgtttctgaccttaggccagcccctttccctccctgagtctctattttcttatctacaatgagacagttggacaaaaaaatcttggcttcccttctaacattaacttcctaaagtatgcctccgattcattcccttgacactttttatttctaaggaagaaataaaaagagatacacaaacacataaacaca

SEQ ID NO: 86 - RNA, 2443 nt, Homo sapiens
  source 1..2443: mol_type = mRNA
atcttgcgggagaccgggttgggctgtgacgctgctgctggggtcagaatgtcatacccaggctatcccccaacaggctacccacctttccctggatatcctcctgcaggtcaggagtcatcttttcccccttctggtcagtatccttatcctagtggctttcctccaatgggaggaggtgcctacccacaagtgccaagtagtggctacccaggagctggaggctaccctgcgcctggaggttatccagcccctggaggctatcctggtgccccacagccagggggagctccatcctatcccggagttcctccaggccaaggatttggagtcccaccaggtggagcaggcttttctgggtatccacagccaccttcacagtcttatggaggtggtccagcacaggttccactacctggtggctttcctggaggacagatgccttctcagtatcctggaggacaacctacttaccctagtcagcctgccacagtgactcaggtcactcaaggaactatccgaccagctgccaacttcgatgctataagagatgcagaaattcttcgtaaggcaatgaagggttttgggacagatgagcaggcaattgtggatgtggtggccaaccgttccaatgatcagaggcaaaaaattaaagcagcatttaagacctcctatggcaaggatttaatcaaagatctcaaatcagagttaagtggaaatatggaagaactgatcctggccctcttcatgcctcctacgtattacgatgcctggagcttacggaaagcaatgcagggagcaggaactcaggaacgtgtattgattgagattttgtgcacaagaacaaatcaggaaatccgagaaattgtcagatgttatcagtcagaatttggacgagaccttgaaaaggacattaggtcagatacatcaggacattttgaacgtttacttgtgtccatgtgccagggaaatcgtgatgagaaccagagtataaaccaccaaatggctcaggaagatgctcagcgtctctatcaagctggtgaggggagactagggaccgatgaatcttgctttaacatgatccttgccacaagaagctttcctcagctgagagctaccatggaggcttattctaggatggctaatcgagacttgttaagcagtgtgagccgtgagttttccggatatgtagaaagtggtttgaagaccatcttgcagtgtgccctgaaccgccctgccttctttgctgagaggctctactatgctatgaaaggtgctggcacagatgactccaccctggtccggattgtggtcactcgaagtgagattgaccttgtacaaataaaacagatgttcgctcagatgtatcagaagactctgggcacaatgattgcaggtgacacgagtggagattaccgaagacttcttctggctattgtgggccagtaggagggatttttttttttttaatgaaaaaaaatttctattcatagcttatccttcagagcaatgacctgcatgcagcaatatcaaacatcagctaaccgaaagagctttctgtcaaggaccgtatcagggtaatgtgcttggtttgcacatgttgttattgccttaattctaattttattttgttctctacatacaatcaatgtaaagccatatcacaatgatacagtaatattgcaatgtttgtaaaccttcattcttactagtttcattctaatcaagatgtcaaattgaataaaaatcacagcaatctctgattctgtgtaataatattgaataattttttagaaggttactgaaagctctgccttccggaatccctctaagtctgcttgatagagtggatagtgtgttaaaactgtgtactttaaaaaaaaattcaacctttacatctagaataatttgcatctcattttgcctaaattggttctgtattcataaacactttccacatagaaaatagattagtattacctgtggcaccttttaagaaagggtcaaatgtttatatgcttaagatacatagcctacttttttttcgcagttgttttctttttttaaattgagttatgacaaataaaaaattgcatatatttaaggtgtacaatatggtgttttgatatcagcattccttgtgtaatgattccacaattaaggtcaggctaattacgtatctgtcaccttgacatagttaccattttttcatgtgtggtgaaaacacttaagatctactaccttagcaaattttaagtgttcagtacattattaactatagatactgtgctctacattaaacctctagcatttattcgttttataactgaaagtttataccctttgaccaacatctccccattttccccacctctcacctggacaaccaccactgtgtttaagttcagctattttagattccacgtataaatggtatacaata

SEQ ID NO: 87 - RNA, 2509 nt, Homo sapiens
  source 1..2509: mol_type = mRNA
atcttgcgggagaccgggttgggctgtgacgctgctgctggggtcagaatgtcatacccaggctatcccccaacaggctacccacctttccctggatatcctcctgcaggtcaggagtcatcttttcccccttctggtcagtatccttatcctagtggctttcctccaatgggaggaggtgcctacccacaagtgccaagtagtggctacccaggagctggaggctaccctgcgcctggaggttatccagcccctggaggctatcctggtgccccacagccagggggagctccatcctatcccggagttcctccaggccaaggatttggagtcccaccaggtggagcaggcttttctgggtatccacagccaccttcacagtcttatggaggtggtccagcacaggttccactacctggtggctttcctggaggacagatgccttctcagtatcctggaggacaacctacttaccctagtcagatcaatacagattctttttcttcctatcctgttttctctcctgtttctttggattatagcagtgaacctgccacagtgactcaggtcactcaaggaactatccgaccagctgccaacttcgatgctataagagatgcagaaattcttcgtaaggcaatgaagggttttgggacagatgagcaggcaattgtggatgtggtggccaaccgttccaatgatcagaggcaaaaaattaaagcagcatttaagacctcctatggcaaggatttaatcaaagatctcaaatcagagttaagtggaaatatggaagaactgatcctggccctcttcatgcctcctacgtattacgatgcctggagcttacggaaagcaatgcagggagcaggaactcaggaacgtgtattgattgagattttgtgcacaagaacaaatcaggaaatccgagaaattgtcagatgttatcagtcagaatttggacgagaccttgaaaaggacattaggtcagatacatcaggacattttgaacgtttacttgtgtccatgtgccagggaaatcgtgatgagaaccagagtataaaccaccaaatggctcaggaagatgctcagcgtctctatcaagctggtgaggggagactagggaccgatgaatcttgctttaacatgatccttgccacaagaagctttcctcagctgagagctaccatggaggcttattctaggatggctaatcgagacttgttaagcagtgtgagccgtgagttttccggatatgtagaaagtggtttgaagaccatcttgcagtgtgccctgaaccgccctgccttctttgctgagaggctctactatgctatgaaaggtgctggcacagatgactccaccctggtccggattgtggtcactcgaagtgagattgaccttgtacaaataaaacagatgttcgctcagatgtatcagaagactctgggcacaatgattgcaggtgacacgagtggagattaccgaagacttcttctggctattgtgggccagtaggagggatttttttttttttaatgaaaaaaaatttctattcatagcttatccttcagagcaatgacctgcatgcagcaatatcaaacatcagctaaccgaaagagctttctgtcaaggaccgtatcagggtaatgtgcttggtttgcacatgttgttattgccttaattctaattttattttgttctctacatacaatcaatgtaaagccatatcacaatgatacagtaatattgcaatgtttgtaaaccttcattcttactagtttcattctaatcaagatgtcaaattgaataaaaatcacagcaatctctgattctgtgtaataatattgaataattttttagaaggttactgaaagctctgccttccggaatccctctaagtctgcttgatagagtggatagtgtgttaaaactgtgtactttaaaaaaaaattcaacctttacatctagaataatttgcatctcattttgcctaaattggttctgtattcataaacactttccacatagaaaatagattagtattacctgtggcaccttttaagaaagggtcaaatgtttatatgcttaagatacatagcctacttttttttcgcagttgttttctttttttaaattgagttatgacaaataaaaaattgcatatatttaaggtgtacaatatggtgttttgatatcagcattccttgtgtaatgattccacaattaaggtcaggctaattacgtatctgtcaccttgacatagttaccattttttcatgtgtggtgaaaacacttaagatctactaccttagcaaattttaagtgttcagtacattattaactatagatactgtgctctacattaaacctctagcatttattcgttttataactgaaagtttataccctttgaccaacatctccccattttccccacctctcacctggacaaccaccactgtgtttaagttcagctattttagattccacgtataaatggtatacaata

SEQ ID NO: 88 - RNA, 2454 nt, Homo sapiens
  source 1..2454: mol_type = mRNA
atcttgcgggagaccgggttgggctgtgacgctgctgctggggtcagcctgcaggtcaggagtcatcttttcccccttctggtcagtatccttatcctagtggctttcctccaatgggaggaggtgcctacccacaagtgccaagtagtggctacccaggagctggaggctaccctgcgcctggaggttatccagcccctggaggctatcctggtgccccacagccagggggagctccatcctatcccggagttcctccaggccaaggatttggagtcccaccaggtggagcaggcttttctgggtatccacagccaccttcacagtcttatggaggtggtccagcacaggttccactacctggtggctttcctggaggacagatgccttctcagtatcctggaggacaacctacttaccctagtcagatcaatacagattctttttcttcctatcctgttttctctcctgtttctttggattatagcagtgaacctgccacagtgactcaggtcactcaaggaactatccgaccagctgccaacttcgatgctataagagatgcagaaattcttcgtaaggcaatgaagggttttgggacagatgagcaggcaattgtggatgtggtggccaaccgttccaatgatcagaggcaaaaaattaaagcagcatttaagacctcctatggcaaggatttaatcaaagatctcaaatcagagttaagtggaaatatggaagaactgatcctggccctcttcatgcctcctacgtattacgatgcctggagcttacggaaagcaatgcagggagcaggaactcaggaacgtgtattgattgagattttgtgcacaagaacaaatcaggaaatccgagaaattgtcagatgttatcagtcagaatttggacgagaccttgaaaaggacattaggtcagatacatcaggacattttgaacgtttacttgtgtccatgtgccagggaaatcgtgatgagaaccagagtataaaccaccaaatggctcaggaagatgctcagcgtctctatcaagctggtgaggggagactagggaccgatgaatcttgctttaacatgatccttgccacaagaagctttcctcagctgagagctaccatggaggcttattctaggatggctaatcgagacttgttaagcagtgtgagccgtgagttttccggatatgtagaaagtggtttgaagaccatcttgcagtgtgccctgaaccgccctgccttctttgctgagaggctctactatgctatgaaaggtgctggcacagatgactccaccctggtccggattgtggtcactcgaagtgagattgaccttgtacaaataaaacagatgttcgctcagatgtatcagaagactctgggcacaatgattgcaggtgacacgagtggagattaccgaagacttcttctggctattgtgggccagtaggagggatttttttttttttaatgaaaaaaaatttctattcatagcttatccttcagagcaatgacctgcatgcagcaatatcaaacatcagctaaccgaaagagctttctgtcaaggaccgtatcagggtaatgtgcttggtttgcacatgttgttattgccttaattctaattttattttgttctctacatacaatcaatgtaaagccatatcacaatgatacagtaatattgcaatgtttgtaaaccttcattcttactagtttcattctaatcaagatgtcaaattgaataaaaatcacagcaatctctgattctgtgtaataatattgaataattttttagaaggttactgaaagctctgccttccggaatccctctaagtctgcttgatagagtggatagtgtgttaaaactgtgtactttaaaaaaaaattcaacctttacatctagaataatttgcatctcattttgcctaaattggttctgtattcataaacactttccacatagaaaatagattagtattacctgtggcaccttttaagaaagggtcaaatgtttatatgcttaagatacatagcctacttttttttcgcagttgttttctttttttaaattgagttatgacaaataaaaaattgcatatatttaaggtgtacaatatggtgttttgatatcagcattccttgtgtaatgattccacaattaaggtcaggctaattacgtatctgtcaccttgacatagttaccattttttcatgtgtggtgaaaacacttaagatctactaccttagcaaattttaagtgttcagtacattattaactatagatactgtgctctacattaaacctctagcatttattcgttttataactgaaagtttataccctttgaccaacatctccccattttccccacctctcacctggacaaccaccactgtgtttaagttcagctattttagattccacgtataaatggtatacaata

SEQ ID NO: 89 - RNA, 2388 nt, Homo sapiens
  source 1..2388: mol_type = mRNA
atcttgcgggagaccgggttgggctgtgacgctgctgctggggtcagcctgcaggtcaggagtcatcttttcccccttctggtcagtatccttatcctagtggctttcctccaatgggaggaggtgcctacccacaagtgccaagtagtggctacccaggagctggaggctaccctgcgcctggaggttatccagcccctggaggctatcctggtgccccacagccagggggagctccatcctatcccggagttcctccaggccaaggatttggagtcccaccaggtggagcaggcttttctgggtatccacagccaccttcacagtcttatggaggtggtccagcacaggttccactacctggtggctttcctggaggacagatgccttctcagtatcctggaggacaacctacttaccctagtcagcctgccacagtgactcaggtcactcaaggaactatccgaccagctgccaacttcgatgctataagagatgcagaaattcttcgtaaggcaatgaagggttttgggacagatgagcaggcaattgtggatgtggtggccaaccgttccaatgatcagaggcaaaaaattaaagcagcatttaagacctcctatggcaaggatttaatcaaagatctcaaatcagagttaagtggaaatatggaagaactgatcctggccctcttcatgcctcctacgtattacgatgcctggagcttacggaaagcaatgcagggagcaggaactcaggaacgtgtattgattgagattttgtgcacaagaacaaatcaggaaatccgagaaattgtcagatgttatcagtcagaatttggacgagaccttgaaaaggacattaggtcagatacatcaggacattttgaacgtttacttgtgtccatgtgccagggaaatcgtgatgagaaccagagtataaaccaccaaatggctcaggaagatgctcagcgtctctatcaagctggtgaggggagactagggaccgatgaatcttgctttaacatgatccttgccacaagaagctttcctcagctgagagctaccatggaggcttattctaggatggctaatcgagacttgttaagcagtgtgagccgtgagttttccggatatgtagaaagtggtttgaagaccatcttgcagtgtgccctgaaccgccctgccttctttgctgagaggctctactatgctatgaaaggtgctggcacagatgactccaccctggtccggattgtggtcactcgaagtgagattgaccttgtacaaataaaacagatgttcgctcagatgtatcagaagactctgggcacaatgattgcaggtgacacgagtggagattaccgaagacttcttctggctattgtgggccagtaggagggatttttttttttttaatgaaaaaaaatttctattcatagcttatccttcagagcaatgacctgcatgcagcaatatcaaacatcagctaaccgaaagagctttctgtcaaggaccgtatcagggtaatgtgcttggtttgcacatgttgttattgccttaattctaattttattttgttctctacatacaatcaatgtaaagccatatcacaatgatacagtaatattgcaatgtttgtaaaccttcattcttactagtttcattctaatcaagatgtcaaattgaataaaaatcacagcaatctctgattctgtgtaataatattgaataattttttagaaggttactgaaagctctgccttccggaatccctctaagtctgcttgatagagtggatagtgtgttaaaactgtgtactttaaaaaaaaattcaacctttacatctagaataatttgcatctcattttgcctaaattggttctgtattcataaacactttccacatagaaaatagattagtattacctgtggcaccttttaagaaagggtcaaatgtttatatgcttaagatacatagcctacttttttttcgcagttgttttctttttttaaattgagttatgacaaataaaaaattgcatatatttaaggtgtacaatatggtgttttgatatcagcattccttgtgtaatgattccacaattaaggtcaggctaattacgtatctgtcaccttgacatagttaccattttttcatgtgtggtgaaaacacttaagatctactaccttagcaaattttaagtgttcagtacattattaactatagatactgtgctctacattaaacctctagcatttattcgttttataactgaaagtttataccctttgaccaacatctccccattttccccacctctcacctggacaaccaccactgtgtttaagttcagctattttagattccacgtataaatggtatacaata

SEQ ID NO: 90 - RNA, 2134 nt, Homo sapiens
  source 1..2134: mol_type = mRNA
agagcccgggggcgaggggacggcaggcaggtgtggcgctgccctgggcgggcttgcacccccacacccaagtgagcggcctgctcactcctcagctgcaggagccagacgtgtggagtcccagcagaggccaacctgtgtctcttcatctccctgggaaaggtgcccccgaggtgaaagagatggcctggtggaaatcctggattgaacaggagggtgtcacagtgaagagcagctcccacttcaacccagaccctgatgcagagaccctctacaaagccatgaaggggatcggtgtcgggtcccaactgctcagccaccaagcagctgccttcgccttcccctcctccgccctcaccagtgtgtcaccctgggggcagcagggtcacttgtgctgtaaccctgcagggaccaacgagcaggctatcatcgatgtgctcaccaagagaagcaacacgcagcggcagcagatcgccaagtccttcaaggctcagttcggcaaggacctcactgagaccttgaagtctgagctcagtggcaagtttgagaggctcattgtggcccttatgtacccgccatacagatacgaagccaaggagctgcatgacgccatgaagggcttaggaaccaaggagggtgtcatcattgagatcctggcctctcggaccaagaaccagctgcgggagataatgaaggcgtatgaggaagactatgggtccagcctggaggaggacatccaagcagacacaagtggctacctggagaggatcctggtgtgcctcctgcagggcagcagggatgatgtgagcagctttgtggacccaggactggccctccaagacgcacaggatctgtatgcggcaggcgagaagattcgtgggactgatgagatgaaattcatcaccatcctgtgcacgcgcagtgccactcacctgctgagagtgtttgaagagtatgagaaaattgccaacaagagcattgaggacagcatcaagagtgagacccatggctcactggaggaggccatgctcactgtggtgaaatgcacccaaaacctccacagctactttgcagagagactctactatgccatgaagggagcagggacgcgtgatgggaccctgataagaaacatcgtttcaaggagcgagattgacttaaatcttatcaaatgtcacttcaagaagatgtacggcaagaccctcagcagcatgatcatggaagacaccagcggtgactacaagaacgccctgctgagcctggtgggcagcgacccctgaggcacagaagaacaagagcaaagaccatgaagccagagtctccaggactcctcactcaacctcggccatggacgcaggttgggtgtgaggggggtcccagcctttcggtcttctatttccctatttccagtgctttccagccgggtttctgacccagagggtggaaccggcctggactcctcttcccaacttcctccaggtcatttcccagtgtgagcacaatgccaaccttagtgtttctccagccagacagatgcctcagcatgaagggcttggggacttgtggatcattccttcctccctgcaggagcttcccaagctggtcacagagtctcctgggcacaggttatacagaccccagccccattcccatctactgaaacagggtctccacaagaggggccagggaatatgggtttttaacaagcgtcttacaaaacacttctctatcatgcagccggagagctggctgggagcccttttgttttagaacacacatccttcagcagctgagaaacgaacacgaatccatcccaaccgagatgccattaacattcatctaaaaatgttaggctctaaatggacgaaaaattctctcgccatcttaataacaaaataaactacaaattcctgacccaaggacactgtgttataagaggcgtgggctcccctggtggctgaccaggtcagctgccctggccttgcacccctctgcatgcagcacagaagggtgtgaccatgccctcagcaccactcttgtccccactgaacggcaactgagactgggtacctggagattctgaagtgcctttgctgtggttttcaaaataataaagatttgtattcaactcaaa

SEQ ID NO: 91 - RNA, 2020 nt, Homo sapiens
  source 1..2020: mol_type = mRNA
agagcccgggggcgaggggacggcaggcaggtgtggcgctgccctgggcgggcttgcacccccacacccaagtgagcggcctgctcactcctcagctgcaggagccagacgtgtggagtcccagcagaggccaacctgtgtctcttcatctccctgggaaaggtgcccccgaggtgaaagagatggcctggtggaaatcctggattgaacaggagggtgtcacagtgaagagcagctcccacttcaacccagaccctgatgcagagaccctctacaaagccatgaaggggatcgggaccaacgagcaggctatcatcgatgtgctcaccaagagaagcaacacgcagcggcagcagatcgccaagtccttcaaggctcagttcggcaaggacctcactgagaccttgaagtctgagctcagtggcaagtttgagaggctcattgtggcccttatgtacccgccatacagatacgaagccaaggagctgcatgacgccatgaagggcttaggaaccaaggagggtgtcatcattgagatcctggcctctcggaccaagaaccagctgcgggagataatgaaggcgtatgaggaagactatgggtccagcctggaggaggacatccaagcagacacaagtggctacctggagaggatcctggtgtgcctcctgcagggcagcagggatgatgtgagcagctttgtggacccaggactggccctccaagacgcacaggatctgtatgcggcaggcgagaagattcgtgggactgatgagatgaaattcatcaccatcctgtgcacgcgcagtgccactcacctgctgagagtgtttgaagagtatgagaaaattgccaacaagagcattgaggacagcatcaagagtgagacccatggctcactggaggaggccatgctcactgtggtgaaatgcacccaaaacctccacagctactttgcagagagactctactatgccatgaagggagcagggacgcgtgatgggaccctgataagaaacatcgtttcaaggagcgagattgacttaaatcttatcaaatgtcacttcaagaagatgtacggcaagaccctcagcagcatgatcatggaagacaccagcggtgactacaagaacgccctgctgagcctggtgggcagcgacccctgaggcacagaagaacaagagcaaagaccatgaagccagagtctccaggactcctcactcaacctcggccatggacgcaggttgggtgtgaggggggtcccagcctttcggtcttctatttccctatttccagtgctttccagccgggtttctgacccagagggtggaaccggcctggactcctcttcccaacttcctccaggtcatttcccagtgtgagcacaatgccaaccttagtgtttctccagccagacagatgcctcagcatgaagggcttggggacttgtggatcattccttcctccctgcaggagcttcccaagctggtcacagagtctcctgggcacaggttatacagaccccagccccattcccatctactgaaacagggtctccacaagaggggccagggaatatgggtttttaacaagcgtcttacaaaacacttctctatcatgcagccggagagctggctgggagcccttttgttttagaacacacatccttcagcagctgagaaacgaacacgaatccatcccaaccgagatgccattaacattcatctaaaaatgttaggctctaaatggacgaaaaattctctcgccatcttaataacaaaataaactacaaattcctgacccaaggacactgtgttataagaggcgtgggctcccctggtggctgaccaggtcagctgccctggccttgcacccctctgcatgcagcacagaagggtgtgaccatgccctcagcaccactcttgtccccactgaacggcaactgagactgggtacctggagattctgaagtgcctttgctgtggttttcaaaataataaagatttgtattcaactcaaa

SEQ ID NO: 92 - RNA, 1834 nt, Homo sapiens
  source 1..1834: mol_type = mRNA
agagcccgggggcgaggggacggcaggcaggtgtggcgctgccctgggcgggcttgcacccccacacccaagtgagcggcctgctcactcctcagctgcaggagccagacgtgtggagtcccagcagaggccaacctgtgtctcttcatctccctgggaaaggtgcccccgaggtgaaagagatggcctggtggaaatcctgggacctcactgagaccttgaagtctgagctcagtggcaagtttgagaggctcattgtggcccttatgtacccgccatacagatacgaagccaaggagctgcatgacgccatgaagggcttaggaaccaaggagggtgtcatcattgagatcctggcctctcggaccaagaaccagctgcgggagataatgaaggcgtatgaggaagactatgggtccagcctggaggaggacatccaagcagacacaagtggctacctggagaggatcctggtgtgcctcctgcagggcagcagggatgatgtgagcagctttgtggacccaggactggccctccaagacgcacaggatctgtatgcggcaggcgagaagattcgtgggactgatgagatgaaattcatcaccatcctgtgcacgcgcagtgccactcacctgctgagagtgtttgaagagtatgagaaaattgccaacaagagcattgaggacagcatcaagagtgagacccatggctcactggaggaggccatgctcactgtggtgaaatgcacccaaaacctccacagctactttgcagagagactctactatgccatgaagggagcagggacgcgtgatgggaccctgataagaaacatcgtttcaaggagcgagattgacttaaatcttatcaaatgtcacttcaagaagatgtacggcaagaccctcagcagcatgatcatggaagacaccagcggtgactacaagaacgccctgctgagcctggtgggcagcgacccctgaggcacagaagaacaagagcaaagaccatgaagccagagtctccaggactcctcactcaacctcggccatggacgcaggttgggtgtgaggggggtcccagcctttcggtcttctatttccctatttccagtgctttccagccgggtttctgacccagagggtggaaccggcctggactcctcttcccaacttcctccaggtcatttcccagtgtgagcacaatgccaaccttagtgtttctccagccagacagatgcctcagcatgaagggcttggggacttgtggatcattccttcctccctgcaggagcttcccaagctggtcacagagtctcctgggcacaggttatacagaccccagccccattcccatctactgaaacagggtctccacaagaggggccagggaatatgggtttttaacaagcgtcttacaaaacacttctctatcatgcagccggagagctggctgggagcccttttgttttagaacacacatccttcagcagctgagaaacgaacacgaatccatcccaaccgagatgccattaacattcatctaaaaatgttaggctctaaatggacgaaaaattctctcgccatcttaataacaaaataaactacaaattcctgacccaaggacactgtgttataagaggcgtgggctcccctggtggctgaccaggtcagctgccctggccttgcacccctctgcatgcagcacagaagggtgtgaccatgccctcagcaccactcttgtccccactgaacggcaactgagactgggtacctggagattctgaagtgcctttgctgtggttttcaaaataataaagatttgtattcaactcaaa

SEQ ID NO: 93 - RNA, 1908 nt, Homo sapiens
  source 1..1908: mol_type = mRNA
agacgtgtggagtcccagcagaggccaacctgtgtctcttcatctccgtgagaaaggtgcccccgaagtgaaagagatggcctggtggaaagcctggattgaacaggagggtgtcacagtgaagagcagctcccacttcaacccagaccctgatgcagagaccctctacaaagccatgaaggggatcgggaccaacgagcaggctatcatcgatgtgctcaccaagagaagcaacacgcagcggcagcagatcgccaagtccttcaaggctcagttcggcaaggacctcactgagaccttgaagtctgagctcagtggcaagtttgagaggctcattgtggcccttatgtatccgccatacagatacgaagccaaggagctgcatgacgccatgaagggcttaggaaccaaggagggtgtcatcattgagatcctggcctctcggaccaagaaccagctgcgggagataatgaaggcgtatgaggaagactatgggtccagcctggaggaggacatccaagcagacacaagtggctacctggagaggatcctggtgtgcctcctgcagggcagcagggatgatgtgagcagctttgtggacccggcactggccctccaagacgcacaggatctgtatgcggcaggcgagaagattcgtgggactgatgagatgaaattcatcaccatcctgtgcacgcgcagtgccactcacctgctgagagtgtttgaagagtatgagaaaattgccaacaagagcattgaggacagcatcaagagtgagacccatggctcactggaggaggccatgctcactgtggtgaaatgcacccaaaacctccacagctactttgcagagagactctactatgccatgaagggagcagggacgcgtgatgggaccctgataagaaacatcgtttcaaggagcgagattgacttaaatcttatcaaatgtcacttcaagaagatgtacggcaagaccctcagcagcatgatcatggaagacaccagcggcgactacaagaacgccctgctgagcctggtgggcagcgacccctgaggcacagaagaacaagagcaaagaccatgaagccagagtctccaggactcctcactcaacctcggccatggacgcaggttgggtgtgaggggggtcccagcctttcggtcttctatttccctatttccagtgctttccagccgggtttctgacccagagggtggaaccggcctggactcctcttcccaacttcctccaggtcatttcccagtgtgagcacaatgccaaccttagtgtttctccagccagacagatgcctcagcatgaagggcttggggacttgtggatcattccttcctccctgcaggagcttcccaagctggtcacagagtctcctgggcacaggttatacagaccccagccccattcccatctactgaaacagggtctccacaagaggggccagggaatatgggtttttaacaagcgtcttacaaaacacttctctatcatgcagccggagagctggctgggagcccttttgttttagaacacacatccttcagcagctgagaaatgaacacgaatccatcccaaccgagatgccattaacattcatctaaaaatgttaggctctaaatggacgaaaaattctctcgccatcttaataacaaaataaactacaaattcctgacccaaggacactgtgttataagaggcgtgggctcccctggtggctgaccaggtcagctgccctggccttgcacccctctgcatgcagcacagaagggtgtgaccatgccctcagcaccactcttgtccccactgaacggcaactgagactgggtacctggagattctgaagtgcctttgctgtggttttcaaaataataaagatttgtattcaa

SEQ ID NO: 94 - RNA, 1755 nt, Homo sapiens
  source 1..1755: mol_type = mRNA
agacgtgtggagtcccagcagaggccaacctgtgtctcttcatctccgtgagaaaggtgcccccgaagtgaaagagatggcctggtggaaagcctggattgaacaggagggtgtcacagtgaagagcagctcccacttcaacccagaccctgatgcagagaccctctacaaagccatgaaggggatcggtgtcgggtcccaactgctcagccaccaagcagctgccttcgccttcccctcctccgccctcaccagtgtgtcaccctgggggcagcagggtcacttgtgctgtaaccctgcagggaccaacgagcaggctatcatcgatgtgctcaccaagagaagcaacacgcagcggcagcagatcgccaagtccttcaaggctcagttcggcaaggacctcactgagaccttgaagtctgagctcagtggcaagtttgagaggctcattgtggcccttatgtatccgccatacagatacgaagccaaggagctgcatgacgccatgaagggcagcagggatgatgtgagcagctttgtggacccggcactggccctccaagacgcacaggatctgtatgcggcaggcgagaagattcgtgggactgatgagatgaaattcatcaccatcctgtgcacgcgcagtgccactcacctgctgagagtgaaatgcacccaaaacctccacagctactttgcagagagactctactatgccatgaagggagcagggacgcgtgatgggaccctgataagaaacatcgtttcaaggagcgagattgacttaaatcttatcaaatgtcacttcaagaagatgtacggcaagaccctcagcagcatgatcatggaagacaccagcggcgactacaagaacgccctgctgagcctggtgggcagcgacccctgaggcacagaagaacaagagcaaagaccatgaagccagagtctccaggactcctcactcaacctcggccatggacgcaggttgggtgtgaggggggtcccagcctttcggtcttctatttccctatttccagtgctttccagccgggtttctgacccagagggtggaaccggcctggactcctcttcccaacttcctccaggtcatttcccagtgtgagcacaatgccaaccttagtgtttctccagccagacagatgcctcagcatgaagggcttggggacttgtggatcattccttcctccctgcaggagcttcccaagctggtcacagagtctcctgggcacaggttatacagaccccagccccattcccatctactgaaacagggtctccacaagaggggccagggaatatgggtttttaacaagcgtcttacaaaacacttctctatcatgcagccggagagctggctgggagcccttttgttttagaacacacatccttcagcagctgagaaatgaacacgaatccatcccaaccgagatgccattaacattcatctaaaaatgttaggctctaaatggacgaaaaattctctcgccatcttaataacaaaataaactacaaattcctgacccaaggacactgtgttataagaggcgtgggctcccctggtggctgaccaggtcagctgccctggccttgcacccctctgcatgcagcacagaagggtgtgaccatgccctcagcaccactcttgtccccactgaacggcaactgagactgggtacctggagattctgaagtgcctttgctgtggttttcaaaataataaagatttgtattcaa

SEQ ID NO: 95 - RNA, 1737 nt, Homo sapiens
  source 1..1737: mol_type = mRNA
agacgtgtggagtcccagcagaggccaacctgtgtctcttcatctccgtgagaaaggtgcccccgaagtgaaagagatggcctggtggaaagcctggattgaacaggagggtgtcacagtgaagagcagctcccacttcaacccagaccctgatgcagagaccctctacaaagccatgaaggggatcgggaccaacgagcaggctatcatcgatgtgctcaccaagagaagcaacacgcagcggcagcagatcgccaagtccttcaaggctcagttcggcaaggacctcactgagaccttgaagtctgagctcagtggcaagtttgagaggctcattgtggcccttatgtatccgccatacagatacgaagccaaggagctgcatgacgccatgaagggcagcagggatgatgtgagcagctttgtggacccggcactggccctccaagacgcacaggatctgtatgcggcaggcgagaagattcgtgggactgatgagatgaaattcatcaccatcctgtgcacgcgcagtgccactcacctgctgagagtgtttgaagagtatgagaaaattgccaacaagagcattgaggacagcatcaagagtgagacccatggctcactggaggaggccatgctcactgtggtgaaatgcacccaaaacctccacagctactttgcagagagactctactatgccatgaagggagcagggacgcgtgatgggaccctgataagaaacatcgtttcaaggagcgagattgacttaaatcttatcaaatgtcacttcaagaagatgtacggcaagaccctcagcagcatgatcatggaagacaccagcggcgactacaagaacgccctgctgagcctggtgggcagcgacccctgaggcacagaagaacaagagcaaagaccatgaagccagagtctccaggactcctcactcaacctcggccatggacgcaggttgggtgtgaggggggtcccagcctttcggtcttctatttccctatttccagtgctttccagccgggtttctgacccagagggtggaaccggcctggactcctcttcccaacttcctccaggtcatttcccagtgtgagcacaatgccaaccttagtgtttctccagccagacagatgcctcagcatgaagggcttggggacttgtggatcattccttcctccctgcaggagcttcccaagctggtcacagagtctcctgggcacaggttatacagaccccagccccattcccatctactgaaacagggtctccacaagaggggccagggaatatgggtttttaacaagcgtcttacaaaacacttctctatcatgcagccggagagctggctgggagcccttttgttttagaacacacatccttcagcagctgagaaatgaacacgaatccatcccaaccgagatgccattaacattcatctaaaaatgttaggctctaaatggacgaaaaattctctcgccatcttaataacaaaataaactacaaattcctgacccaaggacactgtgttataagaggcgtgggctcccctggtggctgaccaggtcagctgccctggccttgcacccctctgcatgcagcacagaagggtgtgaccatgccctcagcaccactcttgtccccactgaacggcaactgagactgggtacctggagattctgaagtgcctttgctgtggttttcaaaataataaagatttgtattcaa

SEQ ID NO: 96 - RNA, 1551 nt, Homo sapiens
  source 1..1551: mol_type = mRNA
ctctaccaggccacaccggaggcagtgctcacacaggcaagctaccaggccacaacaacgacacccacctcacctctggcacctctgagcatccacgtacttgcaagaactcttgctcacatcagctaagagattgcacctgctgacctagagattccggcctgtgctcctgtgctgctgagcagggcaaccagtagcaccatgtctgtgactggcgggaagatggcaccgtccctcacccaggagatcctcagccacctgggcctggccagcaagactgcagcgtgggggaccctgggcaccctcaggaccttcttgaacttcagcgtggacaaggatgcgcagaggctactgagggccattactggccaaggcgtggaccgcagtgccattgtggacgtgctgaccaaccggagcagagagcaaaggcagctcatctcacgaaacttccaggagcgcacccaacaggacctgatgaagtctctacaggcagcactttccggcaacctggagaggattgtgatggctctgctgcagcccacagcccagtttgacgcccaggaattgaggacagctctgaaggcctcagattctgctgtggacgtggccattgaaattcttgccactcgaaccccaccccagctgcaggagtgcctggcagtctacaaacacaatttccaggtggaggctgtggatgacatcacatctgagaccagtggcatcttgcaggacctgctgttggccctggccaaggggggccgtgacagctactctggaatcattgactataatctggcagaacaagatgtccaggcactgcagcgggcagaaggacctagcagagaggaaacatgggtcccagtcttcacccagcgaaatcctgaacacctcatccgagtgtttgatcagtaccagcggagcactgggcaagagctggaggaggctgtccagaaccgtttccatggagatgctcaggtggctctgctcggcctagcttcggtgatcaagaacacaccgctgtactttgctgacaaacttcatcaagccctccaggaaactgagcccaattaccaagtcctgattcgcatccttatctctcgatgtgagactgaccttctgagtatcagagctgagttcaggaagaaatttgggaagtccctctactcttctctccaggatgcagtgaaaggggattgccagtcagccctcctggccttgtgcagggctgaagacatgtgagacttccctgccccaccccacatgacatccgaggatctgagatttccgtgtttggctgaacctgggagaccagctgggcctccaagtaggataacccctcactgagcaccacattctctagcttcttgttgaggctggaactgtttctttaaaatcccttaattttcccatctcaaaattatatctgtacctgggtcatccagctccttcttgggtgtggggaaatgagttttctttgatagtttctgcctcactcatccctcctgtaccctggccagaacatctcactgatactcgaattcttttggcaaa

SEQ ID NO: 97 - RNA, 1441 nt, Homo sapiens
  source 1..1441: mol_type = mRNA
atccagatttgcttttacattttcttgcctgagtctgaggtgaacagtgaacatatttacatttgatttaacagtgaaccttaattctttctggcttcacagtgaaacaagtttatgcaatcgatcaaatattttcatccctgaggttaacaattaccatcaaaatgttttgtggagactatgtgcaaggaaccatcttcccagctcccaatttcaatcccataatggatgcccaaatgctaggaggagcactccaaggatttgactgtgacaaagacatgctgatcaacattctgactcagcgctgcaatgcacaaaggatgatgattgcagaggcataccagagcatgtatggccgggacctgattggggatatgagggagcagctttcggatcacttcaaagatgtgatggctggcctcatgtacccaccaccactgtatgatgctcatgagctctggcatgccatgaagggagtaggcactgatgagaattgcctcattgaaatactagcttcaagaacaaatggagaaattttccagatgcgagaagcctactgcttgcaatacagcaataacctccaagaggacatttattcagagacctcaggacacttcagagatactctcatgaacttggtccaggggaccagagaggaaggatatacagaccctgcgatggctgctcaggatgcaatggtcctatgggaagcctgtcagcagaagacgggggagcacaaaaccatgctgcaaatgatcctgtgcaacaagagctaccagcagctgcggctggttttccaggaatttcaaaatatttctgggcaagatatggtagatgccattaatgaatgttatgatggatactttcaggagctgctggttgcaattgttctctgtgttcgagacaaaccagcctattttgcttatagattatatagtgcaattcatgactttggtttccataataaaactgtaatcaggattctcattgccagaagtgaaatagacctgctgaccataaggaaacgatacaaagagcgatatggaaaatccctatttcatgatatcagaaattttgcttcagggcattataagaaagcactgcttgccatctgtgctggtgatgctgaggactactaaaatgaagaggacttggagtactgtgcactcctctttctagacacttccaaatagagattttctcacaaatttgtactgttcatggcactattaacaaaactatacaatcatattttctcttctatctttgaaattattctaagccaaagaaaactatgaatgaaagtatatgatactgaatttgcctactatcctgaatttgcctactatctaatcagcaattaaataaattgtgcatgatggaataatagaaaaattgcattggaatagattttatttaaatgtgaaccatcaacaaccta

SEQ ID NO: 98 - RNA, 6685 nt, Homo sapiens
  source 1..6685: mol_type = mRNA
ggagttttccgcccggcgctgacggctgctgcgcccgcggctccccagtgccccgagtgccccgcgggccccgcgagcgggagtgggacccagcccctaggcagaacccaggcgccgcgcccgggacgcccgcggagagagccactcccgcccacgtcccatttcgcccctcgcgtccggagtccccgtggccagatctaaccatgagctaccctggctatcccccgcccccaggtggctacccaccagctgcaccaggtggtggtccctggggaggtgctgcctaccctcctccgcccagcatgccccccatcgggctggataacgtggccacctatgcggggcagttcaaccaggactatctctcgggaatggcggccaacatgtctgggacatttggaggagccaacatgcccaacctgtaccctggggcccctggggctggctacccaccagtgccccctggcggctttgggcagcccccctctgcccagcagcctgttcctccctatgggatgtatccacccccaggaggaaacccaccctccaggatgccctcatatccgccatacccaggggcccctgtgccgggccagcccatgccaccccccggacagcagcccccaggggcctaccctgggcagccaccagtgacctaccctggtcagcctccagtgccactccctgggcagcagcagccagtgccgagctacccaggatacccggggtctgggactgtcacccccgctgtgcccccaacccagtttggaagccgaggcaccatcactgatgctcccggctttgaccccctgcgagatgccgaggtcctgcggaaggccatgaaaggcttcgggacggatgagcaggccatcattgactgcctggggagtcgctccaacaagcagcggcagcagatcctactttccttcaagacggcttacggcaaggatttgatcaaagatctgaaatctgaactgtcaggaaactttgagaagacaatcttggctctgatgaagaccccagtcctctttgacatttatgagataaaggaagccatcaagggggttggcactgatgaagcctgcctgattgagatcctcgcttcccgcagcaatgagcacatccgagaattaaacagagcctacaaagcagaattcaaaaagaccctggaagaggccattcgaagcgacacatcagggcacttccagcggctcctcatctctctctctcagggaaaccgtgatgaaagcacaaacgtggacatgtcactcgcccagagagatgcccaggagctgtatgcggccggggagaaccgcctgggaacagacgagtccaagttcaatgcggttctgtgctcccggagccgggcccacctggtagcagttttcaatgagtaccagagaatgacaggccgggacattgagaagagcatctgccgggagatgtccggggacctggaggagggcatgctggccgtggtgaaatgtctcaagaataccccagccttctttgcggagaggctcaacaaggccatgaggggggcaggaacaaaggaccggaccctgattcgcatcatggtgtctcgcagcgagaccgacctcctggacatcagatcagagtataagcggatgtacggcaagtcgctgtaccacgacatctcgggagatacttcaggggattaccggaagattctgctgaagatctgtggtggcaatgactgaacagtgactggtggctcacttctgcccacctgccggcaacaccagtgccaggaaaaggccaaaagaatgtctgtttctaacaaatccacaaatagccccgagattcaccgtcctagagcttaggcctgtcttccacccctcctgacccgtatagtgtgccacaggacctgggtcggtctagaactctctcaggatgccttttctaccccatccctcacagcctcttgctgctaaaatagatgtttcatttttctgactcatgcaatcattcccctttgcctgtggctaagacttggcttcatttcgtcatgtaattgtatatttttatttggaggcatattttcttttcttacagtcattgccagacagaggcatacaagtctgtttgctgcatacacatttctggtgagggcgactgggtgggtgaagcaccgtgtcctcgctgaggagagaaagggaggcgtgcctgagaaggtagcctgtgcatctggtgagtgtgtcacgagctttgttactgccaaactcactcctttttagaaaaaacaaaaaaaaagggccagaaagtcattccttccatcttccttgcagaaaccacgagaacaaagccagttccctgtcagtgacagggcttcttgtaatttgtggtatgtgccttaaacctgaatgtctgtagccaaaacttgtttccacattaagagtcagccagctctggaatggtctggaaatgtcttcctggtaccaacttgttttcttctgcttgattctgccctgtggctcagaggtctggccttatcagccagtgaaagttcatgtaaccttacgtagagatttgtgtgcaggaaaccctgagcatacactagtttgcagggactcgtaaggacatgggaagggaggttcccgaaatccaggcaggaggcccagacacctgaaaggcaaagggatcttggttggttgcaggtgcagtgaagtccactgaaggtgtggtgcgaagaatgcagtccttcacccaggtcccaggagggaagaagggtgtgtgctaattcctggtgcccctcggcgggggccagagagaaggatggggacaacccagagagtcacaagaccagtgcctcccctcagggtgcctccaggctgaaaggggctcctggctctggtctctggggaccctgtgcccgttggttggtggtgtgagggaagagaatccataagagagtttctgagaattatggtgtcatgtccagaagctagagcttaccttgcatcaggggtctccacccactccttttccaacctcctgcgttgaggtttagaaaagagagaatcgactaggcactatggctcacgcctgtaatccaaggactttgggaagctgaggtgagaggatcacttgagctcaggagttcaagactagcctagccaacagcgagacccctgtctctactaaaaaatttggccaggcgtggtggctcacggctgtaatcccagcactttgggaggtgaggcgggcagatcacctgaggtcaggagttcgagacccagcctggccaacatggtgaaaccccatctctactaaaaatacaaaaattagccaggcatggtggcacattcctgtaatcccagctacacaggatgctgaggcaggagaatcacttgaacccaggaggcagaggttgtagtgagctgagatcacaccattgcacttcaacctgggtggacagagtgagactctgtctcaaaaaaaaaaaaaaatttacctggcattgtagtgcattccctatagtcggctactctggaggctgaggcaggaagatccttagagcccaagaaattgaggccgtagtaagctgtgattacaccactgcactccagcctggacaacagagcgagaccttgtctcaaatgagaaaaaaacaaaaagaaatgggagaatccagagagactaggctagatcaagcctgctgggtcctggcaggagccccagggagtagctcatctgcagacatttgcttgaggactaccccctaaacataaaggaagaatgacatccgaagggtgtggagcagccatgagctgagaactagcctggtctacctgagattgatggcaggtcctggtcaacacgtcagctctgcgtcagagtccatgcctcaagcccaagctgaagccccatccctgctgctctcccaagaactcctctgctagggcaggccccttgcccttgggtgccaggtgggacctgcctgatgggatggggtgcttggcatatacaacttgccatgaactcaaggtgaccctgggggcctcctgaattgtgatggggcctagaaccaatgtgctctgatgtgaccatattctgtgacattaccttgccctgtttactccaaagttcccagcctggtgcccagcaggcaatattgcacctacagacacatttactttggtttccaaagtgtttttagacatttgaatttgttgccaacatttaaacattgagagatttcatatttttaaaaatctggaattctggcttctcttgaaaactcagaaattctggcactatggggcttgcattcctgcatggctggagctgagttgcagctgcccctttaggcctgtactccttatttgctataggctccgtcttgtattacactaagcccatgtcacccatttggctcctgcaggcctttgggtttgagaccctggtctacacacttggagaccacctgttgtaaagtacatggatgtgctttggtcaaggaatagaccaaggtggatatccaggccagagtgactcagcgagtttaggtcacaggcgtatactccacttgttatataacctgcttgtgtaagttcatacttggctcaaagccactattgtttggaaaaggtataactgccctgctgacgctgtacagatgttcttgggctcggatgggcatggctccacgtggtgtgcactagcacccagagagagtgaagctattgacccctgtaagggagagtgaccatctggcagatagatagaggggagccaggacatggctcagcttgtgcccagagggagagttaagccgctgaccctgtagccagggagtgcacctgcaagcatgggggtggcaggagccacagagctggctgctgagaggagctgcagatctggagaagacagcctaggtaaaggtggacagtgtgagagctgctgatgagatagctgctgaataaaactacattttacctgcctatggcccgccaggttttctttcagctatcgcccatccacccagtcccctcgaacctcagcatgggctggaacctgaccctgggcatgacatttggcatagttgtggacctgacacctgtgtttgtcctagtcctgtttctccctgccttcctgttcctctcgctgccctcatggtcactcccaagagatccaacccatgttaagtatgggctggaggactgcatgaatgcctcatgatcttcccagaggcaaaggcacctactgccttccaaggtcagtgggaggttgggatcaacactgtttattatgcttaggacaaaaaagatagggagaaagatgtgcaaccttacaggtcatctttctgggatagaacacaatgggtcttctcctgcctcctggatatgttagtcaaggccagtccatgctacacatctagtctgacttctaaaatagaagcaccagatgaattcagccctgagagaattttcagcagctgtgggggcgctggaggaaacactattaaatagttttgcacctgagacagatagcctcactcgcctcaccctagtcctggtggcatttgtctcaggtgcaaaatttaagaaagaaaccttggagtgctcaccctgtggctgggtagatggtcctaaagtggtggttttcaagcctgagtgtgtatcaggatcatcaggggagcttgctaaagagcagttcctgcggtcagaccctcatgcattttgagcaggtgtggggactgggaaactgcatctgtaacctgctgtaatctaacgcttatctaaatactactgtgctcacacagagaacaccgcaaaagtagaggtgttcctccagagggcaggtgagcagatggcacagtctgcttggaattcagtcaggtgatgagagatgagatgaggcactcctagctttgggaagagggagctgaaagatgaacctttgcaggtgcccacggtcaaagtggtggtttaatgccatgccatgcccattttctgttggccttggcagggagttacagccctaccttaggacctggctccttatttctgctgtaggctctttcctgccctggccgagatggagtggaatgagacctagaaacatcaagctaaatacatgtcctcagaaagataaaggtttacattttcacccccatcaaatctgaaagctctctgcctgtgtttttctaagggatagggacatcattactcagtccacaacctggactcatgtagggtcccctgtcagtaaaggagtcagtcaagcccaccaggtataccaaggactcttaccctcagcccctactccttggaaagctgccccttggcctaatattggtgtttagcttgagcctgactccttctcaacactaagagctgatgaagtcctgaagcagaaagagctctgacctgagagtcaaacatccttattctgatctcagctcagcccctgatttgttgtgtgaccctggatatgtcacttcctgtctttttgactttttaaaatgaagggtagactagaggagagcttctaaaactttaatgtggtcaacgaaatggaataggaaattccacaagtctgtccttccacaaaagcagcaaataaggtggcaaaaactcaaatttatgggaactctggaaacgaattgaaagtttacagcaatcaggtgaatacctaagaataaaagctggatttagtaaga

SEQ ID NO: 99 - RNA, 7003 nt, Homo sapiens
  source 1..7003: mol_type = mRNA
ggagttttccgcccggcgctgacggctgctgcgcccgcggctccccagtgccccgagtgccccgcgggccccgcgagcgggagtgggacccagcccctaggcagaacccaggcgccgcgcccgggacgcccgcggagagagccactcccgcccacgtcccatttcgcccctcgcgtccggagtccccgtggccaggtgtgtgtctggggaagagacttacagaagtggagttgctgagtcaaagatctaaccatgagctaccctggctatcccccgcccccaggtggctacccaccagctgcaccaggttggctggcactggcctgggttctctctctatagtagaaatcctgccatccagatcctgccactgccacctttgctagcacagctgagcagcctctgagcagcaagagaggaggaggcaggaaatttagggaaggttcttcctggagggtctggagccctggagatgaagagccgatccgaagctgccatgtagaggaaagcatctaacaggccagaggccccatgatgatgtcgaatgcccatcgggcacccagctgagccctgcaggtggtggtccctggggaggtgctgcctaccctcctccgcccagcatgccccccatcgggctggataacgtggccacctatgcggggcagttcaaccaggactatctctcgggaatggcggccaacatgtctgggacatttggaggagccaacatgcccaacctgtaccctggggcccctggggctggctacccaccagtgccccctggcggctttgggcagcccccctctgcccagcagcctgttcctccctatgggatgtatccacccccaggaggaaacccaccctccaggatgccctcatatccgccatacccaggggcccctgtgccgggccagcccatgccaccccccggacagcagcccccaggggcctaccctgggcagccaccagtgacctaccctggtcagcctccagtgccactccctgggcagcagcagccagtgccgagctacccaggatacccggggtctgggactgtcacccccgctgtgcccccaacccagtttggaagccgaggcaccatcactgatgctcccggctttgaccccctgcgagatgccgaggtcctgcggaaggccatgaaaggcttcgggacggatgagcaggccatcattgactgcctggggagtcgctccaacaagcagcggcagcagatcctactttccttcaagacggcttacggcaaggatttgatcaaagatctgaaatctgaactgtcaggaaactttgagaagacaatcttggctctgatgaagaccccagtcctctttgacatttatgagataaaggaagccatcaagggggttggcactgatgaagcctgcctgattgagatcctcgcttcccgcagcaatgagcacatccgagaattaaacagagcctacaaagcagaattcaaaaagaccctggaagaggccattcgaagcgacacatcagggcacttccagcggctcctcatctctctctctcagggaaaccgtgatgaaagcacaaacgtggacatgtcactcgcccagagagatgcccaggagctgtatgcggccggggagaaccgcctgggaacagacgagtccaagttcaatgcggttctgtgctcccggagccgggcccacctggtagcagttttcaatgagtaccagagaatgacaggccgggacattgagaagagcatctgccgggagatgtccggggacctggaggagggcatgctggccgtggtgaaatgtctcaagaataccccagccttctttgcggagaggctcaacaaggccatgaggggggcaggaacaaaggaccggaccctgattcgcatcatggtgtctcgcagcgagaccgacctcctggacatcagatcagagtataagcggatgtacggcaagtcgctgtaccacgacatctcgggagatacttcaggggattaccggaagattctgctgaagatctgtggtggcaatgactgaacagtgactggtggctcacttctgcccacctgccggcaacaccagtgccaggaaaaggccaaaagaatgtctgtttctaacaaatccacaaatagccccgagattcaccgtcctagagcttaggcctgtcttccacccctcctgacccgtatagtgtgccacaggacctgggtcggtctagaactctctcaggatgccttttctaccccatccctcacagcctcttgctgctaaaatagatgtttcatttttctgactcatgcaatcattcccctttgcctgtggctaagacttggcttcatttcgtcatgtaattgtatatttttatttggaggcatattttcttttcttacagtcattgccagacagaggcatacaagtctgtttgctgcatacacatttctggtgagggcgactgggtgggtgaagcaccgtgtcctcgctgaggagagaaagggaggcgtgcctgagaaggtagcctgtgcatctggtgagtgtgtcacgagctttgttactgccaaactcactcctttttagaaaaaacaaaaaaaaagggccagaaagtcattccttccatcttccttgcagaaaccacgagaacaaagccagttccctgtcagtgacagggcttcttgtaatttgtggtatgtgccttaaacctgaatgtctgtagccaaaacttgtttccacattaagagtcagccagctctggaatggtctggaaatgtcttcctggtaccaacttgttttcttctgcttgattctgccctgtggctcagaggtctggccttatcagccagtgaaagttcatgtaaccttacgtagagatttgtgtgcaggaaaccctgagcatacactagtttgcagggactcgtaaggacatgggaagggaggttcccgaaatccaggcaggaggcccagacacctgaaaggcaaagggatcttggttggttgcaggtgcagtgaagtccactgaaggtgtggtgcgaagaatgcagtccttcacccaggtcccaggagggaagaagggtgtgtgctaattcctggtgcccctcggcgggggccagagagaaggatggggacaacccagagagtcacaagaccagtgcctcccctcagggtgcctccaggctgaaaggggctcctggctctggtctctggggaccctgtgcccgttggttggtggtgtgagggaagagaatccataagagagtttctgagaattatggtgtcatgtccagaagctagagcttaccttgcatcaggggtctccacccactccttttccaacctcctgcgttgaggtttagaaaagagagaatcgactaggcactatggctcacgcctgtaatccaaggactttgggaagctgaggtgagaggatcacttgagctcaggagttcaagactagcctagccaacagcgagacccctgtctctactaaaaaatttggccaggcgtggtggctcacggctgtaatcccagcactttgggaggtgaggcgggcagatcacctgaggtcaggagttcgagacccagcctggccaacatggtgaaaccccatctctactaaaaatacaaaaattagccaggcatggtggcacattcctgtaatcccagctacacaggatgctgaggcaggagaatcacttgaacccaggaggcagaggttgtagtgagctgagatcacaccattgcacttcaacctgggtggacagagtgagactctgtctcaaaaaaaaaaaaaaatttacctggcattgtagtgcattccctatagtcggctactctggaggctgaggcaggaagatccttagagcccaagaaattgaggccgtagtaagctgtgattacaccactgcactccagcctggacaacagagcgagaccttgtctcaaatgagaaaaaaacaaaaagaaatgggagaatccagagagactaggctagatcaagcctgctgggtcctggcaggagccccagggagtagctcatctgcagacatttgcttgaggactaccccctaaacataaaggaagaatgacatccgaagggtgtggagcagccatgagctgagaactagcctggtctacctgagattgatggcaggtcctggtcaacacgtcagctctgcgtcagagtccatgcctcaagcccaagctgaagccccatccctgctgctctcccaagaactcctctgctagggcaggccccttgcccttgggtgccaggtgggacctgcctgatgggatggggtgcttggcatatacaacttgccatgaactcaaggtgaccctgggggcctcctgaattgtgatggggcctagaaccaatgtgctctgatgtgaccatattctgtgacattaccttgccctgtttactccaaagttcccagcctggtgcccagcaggcaatattgcacctacagacacatttactttggtttccaaagtgtttttagacatttgaatttgttgccaacatttaaacattgagagatttcatatttttaaaaatctggaattctggcttctcttgaaaactcagaaattctggcactatggggcttgcattcctgcatggctggagctgagttgcagctgcccctttaggcctgtactccttatttgctataggctccgtcttgtattacactaagcccatgtcacccatttggctcctgcaggcctttgggtttgagaccctggtctacacacttggagaccacctgttgtaaagtacatggatgtgctttggtcaaggaatagaccaaggtggatatccaggccagagtgactcagcgagtttaggtcacaggcgtatactccacttgttatataacctgcttgtgtaagttcatacttggctcaaagccactattgtttggaaaaggtataactgccctgctgacgctgtacagatgttcttgggctcggatgggcatggctccacgtggtgtgcactagcacccagagagagtgaagctattgacccctgtaagggagagtgaccatctggcagatagatagaggggagccaggacatggctcagcttgtgcccagagggagagttaagccgctgaccctgtagccagggagtgcacctgcaagcatgggggtggcaggagccacagagctggctgctgagaggagctgcagatctggagaagacagcctaggtaaaggtggacagtgtgagagctgctgatgagatagctgctgaataaaactacattttacctgcctatggcccgccaggttttctttcagctatcgcccatccacccagtcccctcgaacctcagcatgggctggaacctgaccctgggcatgacatttggcatagttgtggacctgacacctgtgtttgtcctagtcctgtttctccctgccttcctgttcctctcgctgccctcatggtcactcccaagagatccaacccatgttaagtatgggctggaggactgcatgaatgcctcatgatcttcccagaggcaaaggcacctactgccttccaaggtcagtgggaggttgggatcaacactgtttattatgcttaggacaaaaaagatagggagaaagatgtgcaaccttacaggtcatctttctgggatagaacacaatgggtcttctcctgcctcctggatatgttagtcaaggccagtccatgctacacatctagtctgacttctaaaatagaagcaccagatgaattcagccctgagagaattttcagcagctgtgggggcgctggaggaaacactattaaatagttttgcacctgagacagatagcctcactcgcctcaccctagtcctggtggcatttgtctcaggtgcaaaatttaagaaagaaaccttggagtgctcaccctgtggctgggtagatggtcctaaagtggtggttttcaagcctgagtgtgtatcaggatcatcaggggagcttgctaaagagcagttcctgcggtcagaccctcatgcattttgagcaggtgtggggactgggaaactgcatctgtaacctgctgtaatctaacgcttatctaaatactactgtgctcacacagagaacaccgcaaaagtagaggtgttcctccagagggcaggtgagcagatggcacagtctgcttggaattcagtcaggtgatgagagatgagatgaggcactcctagctttgggaagagggagctgaaagatgaacctttgcaggtgcccacggtcaaagtggtggtttaatgccatgccatgcccattttctgttggccttggcagggagttacagccctaccttaggacctggctccttatttctgctgtaggctctttcctgccctggccgagatggagtggaatgagacctagaaacatcaagctaaatacatgtcctcagaaagataaaggtttacattttcacccccatcaaatctgaaagctctctgcctgtgtttttctaagggatagggacatcattactcagtccacaacctggactcatgtagggtcccctgtcagtaaaggagtcagtcaagcccaccaggtataccaaggactcttaccctcagcccctactccttggaaagctgccccttggcctaatattggtgtttagcttgagcctgactccttctcaacactaagagctgatgaagtcctgaagcagaaagagctctgacctgagagtcaaacatccttattctgatctcagctcagcccctgatttgttgtgtgaccctggatatgtcacttcctgtctttttgactttttaaaatgaagggtagactagaggagagcttctaaaactttaatgtggtcaacgaaatggaataggaaattccacaagtctgtccttccacaaaagcagcaaataaggtggcaaaaactcaaatttatgggaactctggaaacgaattgaaagtttacagcaatcaggtgaatacctaagaataaaagctggatttagtaaga

SEQ ID NO: 100 - RNA, 1456 nt, Homo sapiens
  source 1..1456: mol_type = mRNA
gcctgtaggaggactgatctcttgatgaaatacagaaaaaccatctcagaaaaaggaaaatgggcaatcgtcatgctaaagcgagcagtcctcagggttttgatgtggatcgagatgccaaaaagctgaacaaagcctgcaaaggaatggggaccaatgaagcagccatcattgaaatcttatcgggcaggacatcagatgagaggcaacaaatcaagcaaaagtacaaggcaacgtacggcaaggagctggaggaagtactcaagagtgagctgagtggaaacttcgagaagacagcgttggcccttctggaccgtcccagcgagtacgccgcccggcagctgcagaaggctatgaagggtctgggcacagatgagtccgtcctcattgaggtcctgtgcacgaggaccaataaggaaatcatcgccattaaagaggcctaccaaaggctatttgataggagcctcgaatcagatgtcaaaggtgatacaagtggaaacctaaaaaaaatcctggtgtctctgctgcaggctaatcgcaatgaaggagatgacgtggacaaagatctagctggtcaggatgccaaagatctgtatgatgcaggggaaggccgctggggcactgatgagcttgcgttcaatgaagtcctggccaagaggagctacaagcagttacgagccacctttcaagcctatcaaattctcattggcaaagacatagaagaagccattgaagaagaaacatcaggcgacttgcagaaggcctatttaactctcgtgagatgtgcccaggattgtgaggactattttgctgaacgtctgtacaagtcgatgaagggtgcggggaccgatgaggagacgttgattcgcatagtcgtgaccagggccgaggtggaccttcaggggatcaaagcaaagttccaagagaagtatcagaagtctctctctgacatggttcgctcagatacctccggggacttccggaaactgctagtagccctcttgcactgagccaagccagggcaataggaacacagggtggaaccgcctttgtcaagagcacattccaaatcaaacttgcaaatgagactcccgcacgaaaacccttaagagtcccggattactttcttggcagcttaagtggcgcagccaggccaagctgtgtaagttaagggcagtaacgttaagatgcgtgggcagggcaccttgaactctggcttagcaagcatctaggctgcctcttcactttcttttagcatggtaactggatgttttctaaacactaatgaaatcagcagttgatgaaaaaactatgcatttgtaatggcacatttagaaggatatgcatcacacaagtaaggtacaggaaagacaaaattaaacaatttattaattttccttctgtgtgttcaatttgaaagcctcattgttaattaaagttgtggattatgcctcta

SEQ ID NO: 101 - RNA, 1579 nt, Homo sapiens
  source 1..1579: mol_type = mRNA
gcctgtaggaggactgatctcttgatgaaatacagaaaaaccatctcagaaaaaggaaaatgggcaatcgtcatagccagtcgtacaccctctcagaaggcagtcaacagttgcctaaaggggactcccaaccctcgacagtcgtgcagcctctcagccacccatcacggaatggagagccagaggccccacagcctgctaaagcgagcagtcctcagggttttgatgtggatcgagatgccaaaaagctgaacaaagcctgcaaaggaatggggaccaatgaagcagccatcattgaaatcttatcgggcaggacatcagatgagaggcaacaaatcaagcaaaagtacaaggcaacgtacggcaaggagctggaggaagtactcaagagtgagctgagtggaaacttcgagaagacagcgttggcccttctggaccgtcccagcgagtacgccgcccggcagctgcagaaggctatgaagggtctgggcacagatgagtccgtcctcattgaggtcctgtgcacgaggaccaataaggaaatcatcgccattaaagaggcctaccaaaggctatttgataggagcctcgaatcagatgtcaaaggtgatacaagtggaaacctaaaaaaaatcctggtgtctctgctgcaggctaatcgcaatgaaggagatgacgtggacaaagatctagctggtcaggatgccaaagatctgtatgatgcaggggaaggccgctggggcactgatgagcttgcgttcaatgaagtcctggccaagaggagctacaagcagttacgagccacctttcaagcctatcaaattctcattggcaaagacatagaagaagccattgaagaagaaacatcaggcgacttgcagaaggcctatttaactctcgtgagatgtgcccaggattgtgaggactattttgctgaacgtctgtacaagtcgatgaagggtgcggggaccgatgaggagacgttgattcgcatagtcgtgaccagggccgaggtggaccttcaggggatcaaagcaaagttccaagagaagtatcagaagtctctctctgacatggttcgctcagatacctccggggacttccggaaactgctagtagccctcttgcactgagccaagccagggcaataggaacacagggtggaaccgcctttgtcaagagcacattccaaatcaaacttgcaaatgagactcccgcacgaaaacccttaagagtcccggattactttcttggcagcttaagtggcgcagccaggccaagctgtgtaagttaagggcagtaacgttaagatgcgtgggcagggcaccttgaactctggcttagcaagcatctaggctgcctcttcactttcttttagcatggtaactggatgttttctaaacactaatgaaatcagcagttgatgaaaaaactatgcatttgtaatggcacatttagaaggatatgcatcacacaagtaaggtacaggaaagacaaaattaaacaatttattaattttccttctgtgtgttcaatttgaaagcctcattgttaattaaagttgtggattatgcctcta

SEQ ID NO: 102 - protein, 22 aa, synthetic construct
GSGATNFSLLKQAGDVEENPGP

SEQ ID NO: 103 - protein, 18 aa, synthetic construct
EGRGSLLTCGDVEENPGP

SEQ ID NO: 104 - protein, 21 aa, synthetic construct
GSGEGRGSLLTCGDVEENPGP

SEQ ID NO: 105 - protein, 20 aa, synthetic construct
QCTNYALLKLAGDVESNPGP

SEQ ID NO: 106 - protein, 23 aa, synthetic construct
GSGQCTNYALLKLAGDVESNPGP

SEQ ID NO: 107 - protein, 22 aa, synthetic construct
VKQTLNFDLLKLAGDVESNPGP

SEQ ID NO: 108 - protein, 25 aa, synthetic construct
GSGVKQTLNFDLLKLAGDVESNPGP

What is claimed is:

1. A chimeric antigen receptor (CAR), comprising:
an extracellular domain comprising a phosphatidylserine (PS) antigen binding domain, a transmembrane domain; and
an intracellular domain comprising one or more immunostimulatory domains.

2. The CAR of claim 1, wherein the CAR comprises the sequence set forth in any one of SEQ ID NO: 01-SEQ ID NO:03.

3. The CAR of claim 1, wherein the CAR comprises the sequence set forth in any one of SEQ ID NO: 05-SEQ ID NO:07.

4. The CAR of claim 1, wherein the extracellular domain comprises a signal peptide.

5. The CAR of claim 2, wherein the signal peptide comprises a CD8 signal peptide, and wherein the CD8 signal peptide comprises the sequence set forth in SEQ ID NO:08.

6. The CAR of claim 1, wherein the PS binding domain comprises Annexin A1 or the PS-binding core domain, Annexin A2, Annexin A3, Annexin A4, Annexin A5, Annexin A6, Annexin A7, Annexin A8, Annexin A8 Like 1, Annexin A9, Annexin A10, Annexin A11, Annexin A13, Adhesion G Protein Coupled Receptor B1 or the extracellular domain thereof, Apolipoprotein H, Coagulation Factor II, Coagulation Factor VII, Coagulation Factor IX, Coagulation Factor X, Growth Arrest Specific 6, Milk Fat Globule EGF And Factor V/VIII Domain Containing, Advanced Glycosylation End-Product Specific Receptor or the extracellular domain thereof, Protein S, Hepatitis A Virus Cellular Receptor 1 or the extracellular domain thereof, Hepatitis A Virus Cellular Receptor 2 or the extracellular domain thereof, T Cell Immunoglobulin and Mucin Domain Containing or the extracellular domain thereof, Protein Kinase C alpha or the C2 domain thereof, Synaptotagmin (Syt1) or the C2A domain thereof, Stabilin-1 or the extracellular domain thereof, or Stabilin-2 or the extracellular domain thereof.

7. The CAR of claim 1, wherein the PS binding domain comprises the single-chain variable domain of bavituximab, PGN632, P1, IS4, or CL1.

8. The CAR of claim 1, further comprising a spacer domain between the extracellular domain and the transmembrane domain.

9. The CAR of claim 8, wherein the spacer domain comprises a hinge region.

10. The CAR of claim 9, wherein the hinge range comprises the hinge region of CD8a, CD28, IgG1, IgG2, IgG3, IgG4, IgA, or IgD.

11. The CAR of claim 10, wherein the hinge domain comprises a CD8a hinge domain, and wherein the CD8a hinge domain comprises the sequence set forth in SEQ ID NO:09.

12. The CAR of claim 1, wherein the transmembrane domain comprises the transmembrane domain of CD2, CD3γ, CD3ε, CD3δ, CD3ξ, CD4, CD8, CD25, CD27, CD28, CD40, CD79A, CD79B, CD79B, CD80, CD86, CD95 (FAS), CD134 (OX40), CD137 (4-1BB), CD278 (ICOS), TCRα, TCRβ, or any combination thereof.

13. The CAR of claim 12, wherein the transmembrane domain comprise the transmembrane domain of CD28, and wherein the CD28 transmembrane domain comprise the sequence set forth in SEQ ID NO:12.

14. The CAR of claim 1, wherein the intracellular domain comprises one or more immunoreceptor tyrosine-based activation domains (ITAMs).

15. The CAR of claim 14, wherein the ITAM comprises the signaling domain of CD3γ, CD3ξ, CD3ε, CD3δ, CD3ξ, CD5, CD22, CD79a, CD278 (ICOS), or any combination thereof.

16. The CAR of claim 1, wherein the intracellular domain comprises one or more co-stimulatory domains.

17. The CAR of claim 16, wherein the one or more co-stimulatory domains comprise the signaling domain of CD27, CD28, 4-1BB, OX40, CD30, CD40, PD-1, ICOS, LFA-1, CD2, CD7 LIGHT, NKG2C, B7-H3, or any combination thereof.

18. The CAR of claim 1, wherein the intracellular domain comprises an ITAM and one or more co-stimulatory domains, wherein the ITAM comprises the signaling domain of CD3γ, CD3ξ, CD3ε, CD3δ, CD3ξ, CD5, CD22, CD79a, CD278 (ICOS), or any combination thereof, and wherein the co-stimulatory domains comprise the signaling domain of CD27, CD28, 4-1BB, OX40, CD30, CD40, PD-1, ICOS, LFA-1, CD2, CD7 LIGHT, NKG2C, B7-H3, or any combination thereof.

19. The CAR of claim 1, wherein the intracellular domain further comprises a self-cleaving peptide, a signal peptide, and a truncated EGFR domain, or any combination thereof.

20. An isolated nucleic acid molecule encoding the CAR of any preceding claim.

21. A recombinant vector comprising the isolated nucleic acid molecule of claim 20.

22. An immune cell transformed by the recombinant vector of claim 21.

23. A pharmaceutical formulation comprising the isolated nucleic acid of claim 20, the recombinant vector of claim 21, and/or the transformed immune cell of claim 22; and one or more pharmaceutically acceptable carriers.

24. A method of treating cancer, the method comprising: administering to a subject in need thereof a therapeutically effective amount of the immune cells of claim 22 and/or the pharmaceutical formulation of claim 23, wherein, following administration, an effector cell mediated immune modulator response to PS-expressing tumor cells is stimulated.

25. The method of claim 24, wherein administering comprises oral administration, intravenous administration, intratumoral administration, intraperitoneal administration, or any combination thereof.

26. The method of claim 24, further comprising monitoring the subject for adverse effects.

27. The method of claim 26, wherein in the absence of adverse effects, the method further comprises continuing to administering to the subject the immune cells and/or the pharmaceutical formulation.

28. The method of claim 26, wherein in the presence of adverse effects, the method further comprises modifying one or more steps of the method.

29. The method of claim 24, further comprising administering to the subject one or more additional anti-cancer therapies.

30. The method of claim 29, wherein the one or more anti-cancer therapies comprises endocrine therapy, radiotherapy, hormone therapy, gene therapy, thermal therapy, ultrasound therapy, or any combination thereof.

31. The method of claim 29, wherein anti-cancer therapies comprise one or more chemotherapeutic agents.

32. The method of claim 24, wherein the subject has been diagnosed with ovarian cancer, ovarian adenocarcinoma, ovarian teratocarcinoma, lung cancer, small cell lung cancer (SCLC), non-small cell lung cancer (NSCLC), squamous cell lung carcinoma, adenocarcinoma, gastric cancer, breast cancer, hepatic cancer, pancreatic cancer, skin cancer, in particular basal cell carcinoma and squamous cell carcinoma, malignant melanoma, head and neck cancer, malignant pleomorphic adenoma, sarcoma, synovial sarcoma, carcinosarcoma, bile duct cancer, bladder cancer, transitional cell carcinoma, papillary carcinoma, kidney cancer, renal cell carcinoma, clear cell renal cell carcinoma, papillary renal cell carcinoma, colon cancer, small bowel cancer, small bowel adenocarcinoma, adenocarcinoma of the ileum, testicular embryonal carcinoma, placental choriocarcinoma, cervical cancer, testicular cancer, testicular seminoma, testicular teratoma, embryonic testicular cancer, uterine cancer, teratocarcinoma, embryonal carcinoma, or any combination thereof.

33. The method of claim 24, wherein the subject is protected from metastases, wherein the subject's risk of developing metastasis is reduced, and/or wherein the subject''s cancer is treated.
